(19) United States
(12) Patent Application Publication
(10) Pub. No.: US 2025/0163411 A1
(43) Pub. Date: May 22, 2025

(54) Tandem Guide RNAs (TG-RNAs) and Their Use in Genome Editing

(71) Applicant: Vertex Pharmaceuticals Incorporated, Boston, MA (US)

(72) Inventors: D’anna Mae Nelson, Boston, MA (US); Gregoriy Aleksandrovich Dokshin, Boston, MA (US)

(73) Assignee: Vertex Pharmaceuticals Incorporated, Boston, MA (US)

(21) Appl. No.: 19/025,012

(22) Filed: Jan. 16, 2025

Related U.S. Application Data
(63) Continuation of application No. PCT/US23/70355, filed on Jul. 17, 2023.
(60) Provisional application No. 63/390,109, filed on Jul. 18, 2022.

(51) Int. Cl. C12N 15/11; C12N 9/22; C12N 15/86; C12N 15/90

(52) U.S. Cl. CPC C12N 15/11; C12N 9/22; C12N 15/86; C12N 15/907; C12N 2310/20; C12N 2750/14143; C12N 2800/80

(57) ABSTRACT

Compositions comprising tandem gRNAs (tgRNAs) are encompassed as well as their use in treating a disease or disorder that would benefit from an excision of an exon, intron, or exon-intron junction.

[0001] This application is a continuation of International Application No. PCT/US2023/070355, filed Jul. 17, 2023, which claims the benefit of priority to U.S. Provisional Application No. 63/390,109, filed Jul. 18, 2022, both of which are incorporated by reference herein in their entireties.

[0002] The instant application contains a Sequence Listing which has been submitted electronically in XML format and is hereby incorporated by reference in its entirety. Said XML copy, created on Jul. 17, 2023, is named 01245-0038-00PCT_Sequence_Listing and is 2,281,651 bytes in size.

### INTRODUCTION AND SUMMARY

[0003] Genome engineering refers to the strategies and techniques for the targeted, specific modification of the genetic information (genome) of living organisms. Genome engineering is a very active field of research because of the wide range of possible applications, particularly in the areas of human health. For example, genome engineering can be used to alter (e.g., correct or knock-out) a gene carrying a harmful mutation, or to explore the function of a gene. Early technologies developed to knock-out and/or insert a transgene into a living cell were often limited by the random nature of the knock-out or insertion of the new sequence into the genome. Random insertions may result in disrupting normal regulation of neighboring genes leading to severe unwanted effects. Furthermore, technologies that result in random integration offer little reproducibility, as there is no guarantee that the sequence would be inserted at the same place in two different cells.

[0004] CRISPR-based genome editing can provide sequence-specific cleavage of genomic DNA using an endonuclease, such as Cas9, and a guide RNA, such as sgRNA. For example, a nucleic acid encoding the Cas9 enzyme and a nucleic acid encoding an appropriate guide RNA (e.g., sgRNA) can be provided on separate vectors or together on a single vector (if appropriately sized) and administered in vivo or in vitro to knockout or correct (e.g., by altering an aberrant reading frame or when a transgene is also provided), a genetic mutation, for example. The approximately 20 nucleotides at the 5′ end of the guide RNA serves as the guide or spacer sequence that can be any sequence complementary to one strand of a genomic target location that has an adjacent protospacer adjacent motif (PAM). The PAM sequence is a short sequence adjacent to the endonuclease cut site and is required for appropriate editing. The nucleotides 3′ of the guide or spacer sequence of the guide RNA serve as a scaffold sequence for interacting with the endonuclease. When a guide RNA and an appropriate endonuclease are expressed, the guide RNA will bind to the endonuclease and direct it to the sequence complementary to the guide sequence, where it will then initiate a double- or single-stranded break (DSB). To repair these breaks, cells typically use an error prone mechanism of non-homologous end joining (NHEJ) which can lead to disruption of function in the target gene through insertions or deletion of codons, shifts in the reading frame, or result in a premature stop codon triggering nonsense-mediated decay. See, e.g., Kumar et al. (2018) Front. Mol. Neurosci. Vol. 11, Article 413. Moreover, when a transgene (e.g., a heterologous replacement genome section) is provided with the guide RNA/endonuclease, the transgene may be inserted into the cut site to replace a genetic segment, sometimes by a process called homologous recombination.

[0005] The ability to efficiently induce multiple genome edits is a desirable outcome in the field of gene editing. However, current genome editing systems attempting to induce multiple independent gene edits have the challenge of frequently needing multiple transfer vehicles to be administered to accommodate multiple guide RNAs and/or endonucleases and vector size limitations. A system that could utilize a single type of endonuclease and a single or reduced number of transfer vehicles would greatly facilitate commercialization of genome editing systems.

[0006] A number of diseases and disorders can benefit from genome editing. Moreover, a number of diseases and disorders can benefit from gene editing that involves making an excision (e.g., removing a segment) in the genome. For example, repetitive DNA sequences, including trinucleotide repeats and other sequences with self-complementarity, tend to show marked genetic instability and are recognized as a major cause of neurological and neuromuscular diseases. In particular, trinucleotide repeats (TNRs) in or near various genes are associated with a number of neurological and neuromuscular conditions, including degenerative conditions such as myotonic dystrophy type 1 (DM1), Huntington's disease, and various types of spinocerebellar ataxia.

[0007] Muscular dystrophies (MD) are a group of more than 30 genetic diseases characterized by progressive weakness and degeneration of the skeletal muscles that control movement. Duchenne muscular dystrophy (DMD) is one of the most severe forms of MD that affects approximately 1 in 5000 boys and is characterized by progressive muscle weakness and premature death. Cardiomyopathy and heart failure are common, incurable, and lethal features of DMD. The disease is caused by mutations in the gene encoding dystrophin (DMD), which result in loss of expression of dystrophin, causing muscle membrane fragility and progressive muscle wasting. Myotonic Dystrophy Type 1 (DM1) is an autosomal dominant muscle disorder caused by the expansion of CTG repeats in the 3′ untranslated region (UTR) of human DMPK gene, which leads to RNA foci and mis-splicing of genes important for muscle function. The disorder affects skeletal and smooth muscle as well as the eye, heart, endocrine system, and central nervous system, and causes muscle weakness, wasting, physical disablement, and shortened lifespan.

[0008] While gene editing strategies using systems (e.g., CRISPR) for treating various diseases and disorders have been previously explored, these strategies have yet to yield a commercially successful strategy, and current multiplex systems utilize multiple guides and endonucleases and require more than one transfer vehicle. Thus, there remains a need for additional, alternative, and effective gene editing strategies, including for multiplexing, for treating diseases and disorders such as diseases that would benefit from excising portions of genomes, such as DMD and DM1.

[0009] Provided herein are novel compositions called tandem guide RNAs (tgRNAs), which comprise two sgRNAs connected via a linker, that can be used in genome editing applications, such as, for example, to treat diseases and disorders that would benefit from the excision of an exon, intron, or exon-intron junction. A tgRNA, when combined with a single endonuclease or nucleic acid encoding the endonuclease, is able to make two cleavages that are separated by a stretch of nucleotides to excise small or large portions of a genome all while utilizing a single endonuclease and delivery vehicle. While Kweon et. al described fusion guide RNAs (“fgRNAs”) which fused two sgRNAs, the fgRNA of Kweon et al. required two different endonucleases—Cas9 and Cpf1—to induce editing at target sites of Cas9 and Cpf1. Kweon, Jiyeon, et al. “Fusion guide RNAs for orthogonal gene manipulation with Cas9 and Cpf1.” Nature communications 8.1 (2017): 1-6. The present tgRNAs are surprisingly capable of genome editing at multiple sites using only one endonuclease. Resultantly, one benefit of tgRNAs is the ability to package such tgRNA together with an endonuclease or nucleic acid encoding the endonuclease in a single delivery vehicle, making manufacture and administration less expensive and less complex than other systems, which require multiple delivery vehicles. tgRNAs may also be used to induce a cleavage at a genomic DNA site and to induce a cleavage at an exogenous DNA site (e.g., a polynucleotide comprising a donor template).

[0010] Accordingly, the following non-limiting embodiments are provided.

[0011] Embodiment 1 is a nucleic acid comprising a first sgRNA and a second sgRNA, wherein the first sgRNA and the second sgRNA are linked by a linker, and wherein the linker has a guanine and cytosine (GC) content of 5-37%, 5-30%, 5-25%, 5-20%, 10-37%, 10-35%, 10-30%, 10-25%, 10-20%, 15-40%, 15-35%, 15-30%, or 15-25%.

[0012] Embodiment 2 is the nucleic acid of embodiment 1, wherein the linker is 10-30, 15-25, or 18-22 nucleotides in length.

[0013] Embodiment 3 is the nucleic acid of embodiment 1 or embodiment 2, wherein the first sgRNA and the second sgRNA are for use with a SluCas9 endonuclease, optionally wherein the first sgRNA comprises the nucleotide sequence of SEQ ID NO: 384 and the second sgRNA comprises the nucleotide sequence of SEQ ID NO: 391 or SEQ ID NO: 249

[0014] Embodiment 4 is a nucleic acid comprising a first sgRNA and a second sgRNA, wherein the first sgRNA and the second sgRNA are for use with a SluCas9 endonuclease, optionally wherein the first sgRNA comprises the nucleotide sequence of SEQ ID NO: 384 and the second sgRNA comprises the nucleotide sequence of SEQ ID NO: 391 or SEQ ID NO: 249.

[0015] Embodiment 5 is the nucleic acid of embodiment 4, wherein the first sgRNA and the second sgRNA are linked by a linker.

[0016] Embodiment 6 is the nucleic acid of embodiment 5, wherein the linker is greater than 16 nucleotides in length, optionally wherein the linker is 20 nucleotides in length.

[0017] Embodiment 7 is the nucleic acid of any one of embodiments 1-6, wherein the linker comprises the sequence of SEQ ID NO: 119

[0018] Embodiment 8 is the nucleic acid of any one of embodiments 1-7, wherein the first sgRNA comprises a first scaffold and the second sgRNA comprises a second scaffold, and wherein the first scaffold and the second scaffold are each capable of interacting with a SluCas9 endonuclease.

[0019] Embodiment 9 is the nucleic acid of embodiment 8, wherein each of the first scaffold and the second scaffold are identical and comprise the nucleotide sequence of any one of SEQ ID NOs: 901-916.

[0020] Embodiment 10 is the nucleic acid of any one of embodiments 1-9, wherein the nucleic acid does not comprise a guanine at the +1 position in a U6 transcriptional start site.

[0021] Embodiment 11 is the nucleic acid of any one of embodiments 1-10, wherein
[0022] a. the linker connects the 3′ end of the first sgRNA to the 5′ end the second sgRNA.
[0023] b. the linker connects the 3′ end of the reverse complement of the first sgRNA to the 5′ end of the second sgRNA; or
[0024] c. the linker connects the 3′ end of the first sgRNA to the 5′ end of the reverse complement of the second sgRNA.

[0025] Embodiment 12 is the nucleic acid of any one of embodiment 1-11, wherein the first sgRNA targets a genomic region that is downstream of the genomic region targeted by the second sgRNA.

[0026] Embodiment 13 is a nucleic acid comprising a first single guide RNA (sgRNA) connected to a second sgRNA via a linker, wherein
[0027] a. the sgRNAs are for use with the same class, type, subtype, and/or species of endonuclease;
[0028] b. the first sgRNA targets a genomic region that is downstream of the genomic region targeted by the second sgRNA; and
[0029] c. the linker is greater than 16 nucleotides in length, optionally wherein the linker is 17-50, 17-35, 17-25, or 17-22 nucleotides in length.

[0030] Embodiment 14 is the nucleic acid of any one of embodiments 4-13, wherein a guanine and cytosine (GC) content of the linker is 5-40%, 5-35%, 5-30%, 5-25%, 5-20%, 10-40%, 10-35%, 10-30%, 10-25%, 10-20%, 15-40%, 15-35%, 15-30%, or 15-25%.

[0031] Embodiment 15 is a nucleic acid comprising a first single guide RNA (sgRNA) connected to a second sgRNA via a linker, wherein the sgRNAs are for use with the same class, type, subtype, and/or species of endonuclease.

[0032] Embodiment 16 is a composition comprising the nucleic acid of embodiment 15 and optionally further comprising an endonuclease or a nucleic acid encoding an endonuclease.

[0033] Embodiment 17 is the composition of embodiment 16, comprising a nucleic acid encoding an endonuclease, wherein the nucleic acid encoding the endonuclease and the two sgRNAs are on different vectors.

[0034] Embodiment 18 is the composition of any one of embodiments 1-17, wherein the nucleic acid encoding the sgRNAs and/or the nucleic acid encoding the endonuclease, if present, are associated with a lipid nanoparticle (LNP), or a viral vector.

[0035] Embodiment 19 is the composition of embodiment 18, wherein the nucleic acid encoding the sgRNAs and/or the nucleic acid encoding the endonuclease, if present, is associated with a viral vector, wherein the viral vector is an adeno-associated virus vector (AAV), a lentiviral vector, an integrase-deficient lentiviral vector, an adenoviral vector, a vaccinia viral vector, an alphaviral vector, or a herpes simplex viral vector.

[0036] Embodiment 20 is the composition of embodiment 19, wherein the viral vector is an adeno-associated virus (AAV) vector.

[0037] Embodiment 21 is the composition of embodiment 20, wherein the AAV vector is an AAV1, AAV2, AAV3, AAV4, AAV5, AAV6, AAV7, AAV8, or AAV9 vector, wherein the number following AAV indicates the AAV serotype.

[0038] Embodiment 22 is the composition of embodiment 21, wherein the AAV vector is an AAV9 vector.

[0039] Embodiment 23 is a composition comprising a nucleic acid comprising a first and a second sgRNA, wherein the sgRNAs are linked, and wherein the first sgRNA targets a location in a genome that is separated by about 150, 200, 250, 300, 350, 400, 450, 500, 600, 700, 800, 900, 1000, 2000, 3000, 4000, 5000, 6000, 7000, 8000, 9000, or 10000 nucleotides from the location targeted by the second sgRNA.

[0040] Embodiment 24 is the composition of embodiment 23, wherein the first sgRNA targets a location in a genome that is separated by about 20-10,000, 20-5,000, 20-1,000, 20-500, 20-250, 50-10,000, 50-5,000, 50-1,000, 50-500, 50-250, 100-10,000, 100-1,000, 100-500, 100-250, 200-10,000, 200-5,000, 200-1,000, 200-500, 500-10,000, 500-5,000, 500-1,000, 1,000-10,000, 1,000-5,000, or 5,000-10,000 nucleotides from the location targeted by the second sgRNA.

[0041] Embodiment 25 is the composition of any one of embodiments 1-24, wherein the linker connects the 3′ end of a first sgRNA to the 5′ end of a second sgRNA.

[0042] Embodiment 26 is the composition of any one of embodiments 1-24, wherein the linker connects the 3′ end of the reverse complement of a first sgRNA to the 5′ end of a second sgRNA.

[0043] Embodiment 27 is the composition of any one of embodiments 1-24, wherein the linker connects the 3′ end of a first sgRNA to the 5′ end of the reverse complement of a second sgRNA.

[0044] Embodiment 28 is the composition of any one of embodiments 1-27, wherein the composition further comprises a template nucleic acid sequence.

[0045] Embodiment 29 is a method of inserting a template DNA into genomic DNA comprising, administering to a cell the nucleic acid of any one of embodiments 1-15, or the composition of any one of embodiments 16 to 28, an endonuclease or a nucleic acid encoding an endonuclease, and a template nucleic acid, wherein the template nucleic acid is inserted into the genome.

[0046] Embodiment 30 is the nucleic acid of any one of embodiments 1-15 or the composition of any one of embodiments 16 to 28, wherein the endonuclease is a Cas9 endonuclease.

[0047] Embodiment 31 is the composition of embodiment 30, wherein the Cas9 nuclease is isolated or derived from Staphylococcus aureus (SaCas9) or Staphylococcus lugdunensis (SluCas9).

[0048] Embodiment 32 is the nucleic acid of any one of embodiments 1-15 or the composition of any one of embodiments 16 to 28, wherein the linker is between 10 and 250 nucleotides.

[0049] Embodiment 33 is the nucleic acid of any one of embodiments 1-15 or the composition of any one of embodiments 16 to 28, wherein the linker is about 50, about 100, or about 200 nucleotides.

[0050] Embodiment 34 is the nucleic acid of any one of embodiments 1-15 or the composition of any one of embodiments 16 to 28, wherein the linker does not comprise a secondary structure.

[0051] Embodiment 35 is the nucleic acid of any one of embodiments 1-15 or the composition of any one of embodiments 16 to 28, wherein the linker is not a structured linker.

[0052] Embodiment 36 is the nucleic acid of any one of embodiments 1-15 or the composition of any one of embodiments 16 to 28, wherein the linker is shorter in nucleotide length than the nucleotide length between the region in the genome targeted by the first gRNA and the region in the genome targeted by the second gRNA.

[0053] Embodiment 37 is the nucleic acid of any one of embodiments 1-15 or the composition of any one of embodiments 16 to 28, wherein the linker is greater in nucleotide length than the nucleotide length between the region in the genome targeted by the first gRNA and the region in the genome targeted by the second gRNA.

[0054] Embodiment 38 is the nucleic acid of any one of embodiments 1-15 or the composition of any one of embodiments 16 to 28, wherein the linker comprises a ribozyme cleavage site.

[0055] Embodiment 39 is the nucleic acid or composition of embodiment 38, wherein the ribozyme cleavage site is a hammerhead ribozyme cleavage site.

[0056] Embodiment 40 is the nucleic acid of any one of embodiments 1-15 or the composition of any one of embodiments 16 to 28, wherein the linker comprises the sequence of any one of SEQ ID NO: 100 to 106, 112-14, or 117-120.

[0057] Embodiment 41 is the nucleic acid of any one of embodiments 1-15 or the composition of any one of embodiments 16 to 28, wherein the first sgRNA targets a genomic region that is downstream of the genomic region targeted by the second sgRNA.

[0058] Embodiment 42 is the nucleic acid of any one of embodiments 1-15 or the composition of any one of embodiments 16 to 28, wherein the second sgRNA targets a genomic region that is downstream of the genomic region targeted by the first sgRNA.

[0059] Embodiment 43 is the nucleic acid of any one of embodiments 1-15 or the composition of any one of embodiments 16 to 28, wherein the first sgRNA comprises a first scaffold, wherein the second sgRNA comprises a second scaffold, and wherein the first scaffold and the second scaffold are capable of selectively interacting with the same class, type, subtype and/or species of endonuclease.

[0060] Embodiment 44 is the nucleic acid or composition of embodiment 43, wherein the first scaffold nucleotide sequence differs from the second scaffold nucleotide sequence by no more than 1, 2, 3, 4, 5, 6, 7, 8, 9, or 10 nucleotides.

[0061] Embodiment 45 is the nucleic acid or composition of embodiment 44, wherein the first scaffold nucleotide sequence is identical to the second scaffold nucleotide sequence.

[0062] Embodiment 46 is the nucleic acid or composition of any one of embodiments 43-45, wherein the first scaffold and the second scaffold each comprise the nucleotide sequence of any one of SEQ ID Nos: 501-504, 601, or 900-917.

[0063] Embodiment 47 is the nucleic acid or composition of any one of embodiments 43-46, wherein the first scaffold and the second scaffold each comprise the nucleotide sequence of SEQ ID NO: 901.

[0064] Embodiment 48 is the nucleic acid of any one of embodiments 1-15 or the composition of any one of embodiments 16 to 47, wherein the first sgRNA and the second sgRNA are in the same orientation.

[0065] Embodiment 49 is the nucleic acid of any one of embodiments 1-15 or the composition of any one of embodiments 16 to 47, wherein the first sgRNA and the second sgRNA are in opposite orientations.

[0066] Embodiment 50 is the nucleic acid of any one of embodiments 1-15 or the composition of any one of embodiments 16 to 47, wherein the nucleic acid comprises from 5′ to 3′:
[0067] a. a promoter for expression of a first gRNA and a second gRNA, a first gRNA, a first gRNA scaffold, a linker, a second gRNA, a second gRNA scaffold;
[0068] b. a promoter for expression of a first gRNA and a second gRNA, the reverse complement of a first gRNA scaffold, the reverse complement of a first gRNA scaffold, a linker, a second gRNA, and a second gRNA scaffold;
[0069] c. a promoter for expression of a first gRNA and a second gRNA, a first gRNA, a first gRNA scaffold, a linker, the reverse complement of a second gRNA scaffold, and the reverse complement of a second gRNA scaffold;
[0070] d. a promoter for expression of an endonuclease, a gene encoding an endonuclease, a promoter for expression of a first gRNA and a second gRNA, a first gRNA, a first gRNA scaffold, a linker, a second gRNA, a second gRNA scaffold;
[0071] e. a promoter for expression of an endonuclease, a gene encoding an endonuclease, a promoter for expression of a first gRNA and a second gRNA, the reverse complement of a first gRNA scaffold, the reverse complement of a first gRNA scaffold, a linker, a second gRNA, and a second gRNA scaffold;
[0072] f. a promoter for expression of an endonuclease, a gene encoding an endonuclease, a promoter for expression of a first gRNA and a second gRNA, a first gRNA, a first gRNA scaffold, a linker, the reverse complement of a second gRNA scaffold, and the reverse complement of a second gRNA scaffold;
[0073] g. a promoter for expression of a first gRNA and a second gRNA, a first gRNA, a first gRNA scaffold, a linker, a second gRNA, a second gRNA scaffold, a promoter for expression of an endonuclease, a gene encoding an endonuclease;
[0074] h. a promoter for expression of a first gRNA and a second gRNA, the reverse complement of a first gRNA scaffold, the reverse complement of a first gRNA scaffold, a linker, a second gRNA, and a second gRNA scaffold, a promoter for expression of an endonuclease, a gene encoding an endonuclease;
[0075] i. a promoter for expression of a first gRNA and a second gRNA, a first gRNA, a first gRNA scaffold, a linker, the reverse complement of a second gRNA scaffold, and the reverse complement of a second gRNA scaffold, a promoter for expression of an endonuclease, a gene encoding an endonuclease;
[0076] j. the reverse complement of a gene encoding an endonuclease, the reverse complement of a promoter of a gene encoding an endonuclease, a promoter for expression of a first gRNA and a second gRNA, a first gRNA, a first gRNA scaffold, a linker, a second gRNA, a second gRNA scaffold;
[0077] k. the reverse complement of a gene encoding an endonuclease, the reverse complement of a promoter of a gene encoding an endonuclease, a promoter for expression of a first gRNA and a second gRNA, the reverse complement of a first gRNA scaffold, the reverse complement of a first gRNA scaffold, a linker, a second gRNA, and a second gRNA scaffold;
[0078] l. the reverse complement of a gene encoding an endonuclease, the reverse complement of a promoter of a gene encoding an endonuclease, a promoter for expression of a first gRNA and a second gRNA, a first gRNA, a first gRNA scaffold, a linker, the reverse complement of a second gRNA scaffold, and the reverse complement of a second gRNA scaffold;
[0079] m. a promoter for expression of a first gRNA and a second gRNA, a first gRNA, a first gRNA scaffold, a linker, a second gRNA, a second gRNA scaffold, the reverse complement of a gene encoding an endonuclease, the reverse complement of a promoter of a gene encoding an endonuclease;
[0080] n. a promoter for expression of a first gRNA and a second gRNA, the reverse complement of a first gRNA scaffold, the reverse complement of a first gRNA scaffold, a linker, a second gRNA, and a second gRNA scaffold, the reverse complement of a gene encoding an endonuclease, the reverse complement of a promoter of a gene encoding an endonuclease; or
[0081] o. a promoter for expression of a first gRNA and a second gRNA, a first gRNA, a first gRNA scaffold, a linker, the reverse complement of a second gRNA scaffold, and the reverse complement of a second gRNA scaffold, the reverse complement of a gene encoding an endonuclease, the reverse complement of a promoter of a gene encoding an endonuclease.

[0082] Embodiment 51 is a composition comprising the nucleic acid of any one of embodiments 1-15, and optionally further comprising an endonuclease or a nucleic acid encoding an endonuclease, optionally wherein the endonuclease is a SluCas9 endonuclease or the nucleic acid encoding the endonuclease encodes a SluCas9 endonuclease.

[0083] Embodiment 52 is the composition of embodiment 51, comprising a nucleic acid encoding a SluCas9 endonuclease, wherein the nucleic acid encoding the endonuclease and the nucleic acid encoding the first sgRNA and the second sgRNA are on different vectors.

[0084] Embodiment 53 is the composition of embodiment 51 or embodiment 52, wherein the nucleic acid encoding the first sgRNA and the second sgRNA and/or the nucleic acid encoding the endonuclease, if present, are associated with a lipid nanoparticle (LNP), or a viral vector.

[0085] Embodiment 54 is the composition of any one of embodiments 51-53, further comprising a template nucleic acid sequence.

[0086] Embodiment 55 is a method of inserting a template DNA into genomic DNA comprising, administering to a cell the nucleic acid of any one of embodiments 1-15, or the composition of any one of embodiments 51-54, a SluCas9 endonuclease or a nucleic acid encoding a SluCas9 endonuclease, and a template nucleic acid, wherein the template nucleic acid is inserted into the genome.

[0087] Embodiment 56 is the nucleic acid or composition of any one of embodiments 1-54, wherein the sgRNAs target any of exons 2, 3, 6, 9, 44, 45, 47, 48, 50, 51 or 53 of human DMD.

[0088] Embodiment 57 is the nucleic acid or composition of any one of embodiments 1-54 wherein the two sgRNAs are capable of excising a DNA fragment from the DMD gene; wherein the DNA fragment is between 5 and 250 nucleotides in length.

[0089] Embodiment 58 is the nucleic acid or composition of embodiment 57, wherein the excised DNA fragment does not comprise an entire exon of the DMD gene.

[0090] Embodiment 59 is the nucleic acid or composition of any one of embodiments 1-58, wherein the linker is not cleaved or hydrolyzed.

[0091] Embodiment 60 is a method for treating DMD or DM1 comprising administering a therapeutically effective amount of the nucleic acid or composition of any one of embodiments 1-54 to a subject having DMD or DM1.

[0092] Embodiment 61 is the method of embodiment 60, wherein the sgRNAs target the DMPK gene.

[0093] Embodiment 62 is the method of embodiment 60, wherein the sgRNAs are designed to excise CTG repeats.

[0094] Embodiment 63 is the method of embodiment 60, wherein the sgRNAs target the dystrophin gene.

[0095] Embodiment 64 is a method for treating a disease or disorder that would benefit from an excision of an exon, intron, or exon-intron junction comprising administering a therapeutically effective amount of the nucleic acid or composition of any one of embodiments 1-59 to a subject in need thereof.

[0096] Embodiment 65 is the method of any one of embodiments 60-64, wherein less than 60%, 50%, 40%, 30%, 20%, 10%, 5%, 3%, 2%, or 1% of the nucleic acid is processed to separate the first sgRNA from the second sgRNA.

[0097] Embodiment 66 is a nucleic acid comprising a first sgRNA and a second sgRNA, wherein the nucleic acid comprises a nucleotide sequence having at least 80%, at least 85%, at least 90%, at least 95%, at least 96%, at least 97%, at least 98%, at least 99%, or 100% sequence identity to any one of SEQ ID NOs: 121-154 or 157-178.

### DESCRIPTION OF FIGURES

[0098] FIG. 1 shows PCR amplicons visualized on a D1000 ScreenTape (Agilent Technologies). The majority of tgRNAs created deletions (horizontal lines) at the targeted locus. Full length amplicon was expected at 533 bp and was observed in all sample lanes. CleanCut deletion amplicons were expected at 366 bp (Sl8/Sl23), 435 bp (Sl14/Sl21), and 495 bp (Sl19/Sl21). CleanCut deletion amplicons were also present in the samples that expressed the guide pair as individual guides from separate U6 promoters (pVT-49, pVT-56, pVT-61). Each lane shows a PCR amplicon from a single technical replicate.

[0099] FIGS. 2A and 2B show editing results with Sl8/Sl23 tgRNAs comprising multiple linker lengths and orientations. FIG. 2A shows HEK293FT cells at 72 hours after plasmid transfection with Sl8/Sl23 tgRNAs and control plasmids. Transfected cells expressed plasmid derived EGFP. All transfections were qualitatively similar except for Sl23-8fused200 which had fewer EGFP+ cells. Scale bars are 750 microns. Images are representative of three technical replicates from one biological replicate. FIG. 2B shows the percent indels for all Sl8/Sl23 tgRNA, as demonstrated by CleanCut deletions (bottom part of each bar of the bar graph) and other indels (top part of each bar of the bar graph), and as quantified by an ICE algorithm. All tested tgRNAs were functional and created CleanCut deletions and/or other indels. pVT-49 expressing both gRNAs from separate U6 promoters also had observable editing. Mock transfection and nontargeting control gRNA plasmids (pVT-45 and pVT001) were not expected to have editing activity at this locus. All data were derived from 3 technical replicates from one biological replicate.

[0100] FIGS. 3A and 3B show editing results with Sl14/Sl21 tgRNAs comprising multiple linker lengths and orientations. FIG. 3A shows HEK293FT cells at 72 hours after plasmid transfection with Sl14/Sl21 tgRNAs and control plasmids. Transfected cells expressed plasmid derived EGFP. All transfections were qualitatively similar except for Sl14-21fused100 which had fewer EGFP+ cells. Scale bars are 750 microns. Images are representation of three technical replicates from one biological replicate. FIG. 3B shows the percent of indels for all Sl14/Sl21 tgRNAs, as demonstrated by CleanCut deletions (bottom part of each bar of the bar graph) and other indels (top part of each bar of the bar graph), and as quantified by an ICE algorithm. All tested tgRNAs were functional and created CleanCut deletions and/or other indels. pVT-56 expressing both gRNAs from separate U6 promoters also had observable editing. Mock transfection and nontargeting control gRNA plasmids (pVT-45 and pVT001) were not expected to have editing activity at this locus. pVT-56 data were derived from two technical replicates; all other data were derived from three technical replicates from one biological replicate.

[0101] FIGS. 4A-B show editing results with Sl19/Sl21 tgRNAs comprising multiple linker lengths and orientations. FIG. 4A shows HEK293FT cells at 72 hours after plasmid transfection with Sl19/Sl21 tgRNAs and control plasmids. Transfected cells expressed plasmid derived EGFP. All transfections were qualitatively similar. Scale bars are 750 microns. Images are representative of three technical replicates from one biological replicate. FIG. 4B shows the percent of indels for all Sl19/Sl21 tgRNAs, as demonstrated by CleanCut deletions (bottom part of each bar of the bar graph) and other indels (top part of each bar of the bar graph), and as quantified by an ICE algorithm. All tested tgRNAs were functional and created CleanCut deletions and/or other indels. pVT-61 expressing both gRNAs from separate U6 promoters also had observable editin. Mock transfection and nontargeting control gRNA plasmids (pVT-45 and pVT001) were not expected to have editing activity at this locus. All data were derived from three technical replicates from one biological replicate.

[0102] FIGS. 5A-B show a tgRNA-directed donor localization strategy to facilitate homology-dependent or independent gene correction/insertion. tgRNA targets an endonuclease to a specified genomic locus for creation of a double strand break (DSB), while also localizing the donor template (as a linear ssDNA/dsDNA or circularized donor) close to the genomic DSB. FIG. 5A shows that donor sequences can have flanking regions that are homologous to the genomic locus to direct homology-based repair at the targeted genomic site. FIG. 5B shows that donor sequences can also be designed without any homology for insertion into the DSB via non homologous end joining. Endonucleases are indicated in blue (blobs near middle of page). Both linear and circularized donors are shown as examples. In a dual tgRNA approach, two different tgRNAs could be utilized (top half of FIG. 5B), or a single tgRNA could be used (e.g., through use of the targeted genomic protospacers that are designed into the donor sequence) (bottom half of FIG. 5B, wherein the solid gray Cas is targeting the same protospacer in both the targeted locus and the donor, and the Cas represented by diagonal lines is also targeting a single protospacer sequence in both the genomic locus and the donor). This dual tgRNA strategy can be applied with genomic target sites of any orientation (e.g., tandem, PAMin, or PAMout).

[0103] FIGS. 6A-B show tgRNA linkers of less than or equal to 50 nucleotides. FIG. 6A shows that all Sl16/Sl23 tgRNA constructs were functional and created precise deletions (solid gray bars) as quantified by NGS data analysis. tgRNA constructs with linkers of 10-40 nucleotides were highly active, creating similar rates of precise deletion as p62. Mock transfection and nontargeting controls (pVT001 and pVT45) did not create detectable levels of precise deletions. Data are shown as mean±SD and were derived from 3 biological replicates, except SL16_23Fused0 and p62 which were derived from 2 replicates. FIG. 6B shows that all Sl7/Sl3 tgRNA constructs resulted in minimal precise deletion rates. p127 expressing both gRNAs from separate U6 promoters had strong precise deletion activity. Mock transfection and nontargeting controls (pVT001 and pVT45) did not create detectable levels of precise deletions. Data are shown as mean±SD and were derived from 3 biological replicates, except SL7_3Fused10 which was derived from 2 replicates.

[0104] FIG. 7 shows that tgRNAs were active with linkers that were predicted to be linear or structured. v1-v4 linkers were 20-nucleotide linkers predicted to be linear in the context of the larger fgRNA. pFGNRA25 with the v4 linker showed reduced precise deletion activity. tgRNAs with structured linkers (TAR and P4-P6) also created precise deletions. Mock transfection and nontargeting controls (pVT001 and pVT45) did not create detectable levels of precise deletions. Data are shown as mean±SD and were derived from 3 biological replicates, except pFGRNA24-v3Linker and pFGRNA27-P4-P6Linker which were derived from 2 replicates.

[0105] FIG. 8 shows further elucidation of individual variables' impacts on tgRNA activity. All plotted pFGRNA constructs had a single variable different from the reference pFGRNA22 construct. pFGRNA28 and pFGRNA29 contained 20-nucleotide linkers with increased complementarity to the target strand of DNA and showed equivalent precise deletion activity compared to pFGRNA22. pFGRNA30 had a 15% GC content linker and showed increased precise deletion activity compared to pFGRNA22, which had a 30% GC linker; however, pFGRNA31, which had no GC content in the linker sequence, had reduced precise deletion activity. pFGRNA constructs were active with v5 SluCas9 scaffolds (as in pFGRNA32) as well as with v2 SluCas9 scaffolds (all other plotted pFGRNA constructs). Additionally, SL16_23Fused20 (pFGRNA-minusG), which did not include addition of a guanine nucleotide (“+1G”) as the last nucleotide of the U6 promoter transcriptional start site, exhibited increased precise deletion activity compared to the other plotted pFGRNA constructs that all included+1G. Mock transfection and nontargeting controls (pVT001 and pVT45) did not create detectable levels of precise deletions. Data are shown as mean±SD and were derived from 3 biological replicates.

[0106] FIG. 9 shows that tgRNAs containing v2 or v5 scaffolds created precise deletions when paired with SluCas9. Additionally, tgRNAs were also active when used with sRGN3.1 or sRGN3.3 endonucleases. Mock transfection did not create detectable levels of precise deletions. Data are shown as mean±SD and were derived from 3 biological replicates.

[0107] FIG. 10 shows that SluCas9 with tgRNAs were capable of creating precise deletions when targeted to genomic loci that are oriented to be PAMout or PAMin. Similar to tgRNAs targeting tandem genomic sites (FIGS. 2B, 3B, 4B, 6A), shorter linker lengths resulted in higher precise deletion activities than longer linkers within a specific guide order. Mock transfection and nontargeting controls (pVT001 and pVT45) did not create detectable levels of precise deletions. Data are shown as mean±SD and were derived from 3 biological replicates.

[0108] FIG. 11 shows that SaCas9-KKH nuclease created precise deletions with multiple tgRNAs, irrespective of genomic orientation of target sites. All plotted pFGRNA constructs have a 20-nucleotide linker. Mock transfection and nontargeting controls (pSaKKH-SingleEntry and pVT040) did not create detectable levels of precise deletions. Data are shown as mean±SD and were derived from 3 biological replicates.

[0109] FIG. 12 shows a schematic of three exemplary orientations of a pair of genomic target sites, which can be arranged in tandem, PAMout, or PAMin. In the Examples provided herein, tgRNAs were capable of targeting all three orientations. A SluCas9 PAM sequence is shown as an example, but the three exemplary orientations shown are applicable for any pair of target sites for any Cas protein.

[0110] FIG. 13 shows a tgRNA schematic highlighting certain variables that were tested in the Examples provided herein, such as presence/absence of an additional G nucleotide upstream of the tgRNA to complete the U6 transcriptional start site, v2 and v5 scaffold sequences, linker length, structure, and GC content, as well as linker complementarity to the target DNA strand upstream of the second guide.

### DETAILED DESCRIPTION

[0111] Reference will now be made in detail to certain embodiments of the invention, examples of which are illustrated in the accompanying drawings. While the invention is described in conjunction with the illustrated embodiments, it will be understood that they are not intended to limit the invention to those embodiments. On the contrary, the invention is intended to cover all alternatives, modifications, and equivalents, which may be included within the invention as defined by the appended claims and included embodiments.

[0112] Before describing the present teachings in detail, it is to be understood that the disclosure is not limited to specific compositions or process steps, as such may vary. It should be noted that, as used in this specification and the appended claims, the singular form “a”, “an” and “the” include plural references unless the context clearly dictates otherwise. Thus, for example, reference to “a guide” includes a plurality of guides and reference to “a cell” includes a plurality of cells and the like.

[0113] Numeric ranges are inclusive of the numbers defining the range. Measured and measurable values are understood to be approximate, taking into account significant digits and the error associated with the measurement. Also, the use of “comprise”, “comprises”, “comprising”, “contain”, “contains”, “containing”, “include”, “includes”, and “including” are not intended to be limiting. It is to be understood that both the foregoing general description and detailed description are exemplary and explanatory only and are not restrictive of the teachings.

[0114] Unless specifically noted in the specification, embodiments in the specification that recite “comprising” various components are also contemplated as “consisting of” or “consisting essentially of” the recited components; embodiments in the specification that recite “consisting of” various components are also contemplated as “comprising” or “consisting essentially of” the recited components; and embodiments in the specification that recite “consisting essentially of” various components are also contemplated as “consisting of” or “comprising” the recited components (this interchangeability does not apply to the use of these terms in the claims). The term “or” is used in an inclusive sense, i.e., equivalent to “and/or,” unless the context clearly indicates otherwise.

[0115] The section headings used herein are for organizational purposes only and are not to be construed as limiting the desired subject matter in any way. In the event that any material incorporated by reference contradicts any term defined in this specification or any other express content of this specification, this specification controls. While the present teachings are described in conjunction with various embodiments, it is not intended that the present teachings be limited to such embodiments. On the contrary, the present teachings encompass various alternatives, modifications, and equivalents, as will be appreciated by those of skill in the art.

### I. Definitions

[0116] Unless stated otherwise, the following terms and phrases as used herein are intended to have the following meanings:

[0117] “Polynucleotide,” “nucleic acid,” and “nucleic acid molecule,” are used herein to refer to a multimeric compound comprising nucleosides or nucleoside analogs which have nitrogenous heterocyclic bases or base analogs linked together along a backbone, including conventional RNA, DNA, mixed RNA-DNA, and polymers that are analogs thereof. A nucleic acid “backbone” can be made up of a variety of linkages, including one or more of sugar-phosphodiester linkages, peptide-nucleic acid bonds (“peptide nucleic acids” or PNA; PCT No. WO 95/32305), phosphorothioate linkages, methylphosphonate linkages, or combinations thereof. Sugar moieties of a nucleic acid can be ribose, deoxyribose, or similar compounds with substitutions, e.g., 2′ methoxy or 2′ halide substitutions. Nitrogenous bases can be conventional bases (A, G, C, T, U), analogs thereof (e.g., modified uridines such as 5-methoxyuridine, pseudouridine, or N1-methylpseudouridine, or others); inosine; derivatives of purines or pyrimidines (e.g., N⁴-methyl deoxyguanosine, deaza- or aza-purines, deaza- or aza-pyrimidines, pyrimidine bases with substituent groups at the 5 or 6 position (e.g., 5-methylcytosine), purine bases with a substituent at the 2, 6, or 8 positions, 2-amino-6-methylaminopurine, O⁶-methylguanine, 4-thio-pyrimidines, 4-amino-pyrimidines, 4-dimethylhydrazine-pyrimidines, and O⁴-alkyl-pyrimidines; U.S. Pat. No. 5,378,825 and PCT No. WO 93/13121). For general discussion see The Biochemistry of the Nucleic Acids 5-36, Adams et al., ed., 11^{th} ed., 1992).

[0118] The compositions and methods disclosed herein may include a donor nucleic acid, i.e., a “template” nucleic acid. The template nucleic acid may be used as an inserted exogenous nucleic acid sequence (e.g., a gene or portion of a gene) at or near a target site for a Cas nuclease.

[0119] Nucleic acids can include one or more “abasic” residues where the backbone includes no nitrogenous base for position(s) of the polymer (U.S. Pat. No. 5,585,481). A nucleic acid can comprise only conventional RNA or DNA sugars, bases and linkages, or can include both conventional components and substitutions (e.g., conventional bases with 2′ methoxy linkages, or polymers containing both conventional bases and one or more base analogs). Nucleic acid includes “locked nucleic acid” (LNA), an analogue containing one or more LNA nucleotide monomers with a bicyclic furanose unit locked in an RNA mimicking sugar conformation, which enhance hybridization affinity toward complementary RNA and DNA sequences (Vester and Wengel, 2004, Biochemistry 43(42):13233-41). RNA and DNA have different sugar moieties and can differ by the presence of uracil or analogs thereof in RNA and thymine or analogs thereof in DNA.

[0120] “Guide RNA”, “guide RNA”, and simply “guide” are used herein interchangeably to refer to either a crRNA (also known as CRISPR RNA), or the combination of a crRNA and a trRNA (also known as tracrRNA). The crRNA and trRNA may be associated as a single RNA molecule (single guide RNA, sgRNA) or in two separate RNA molecules (dual guide RNA, dgRNA). “Guide RNA” or “guide RNA” refers to each type. The trRNA may be a naturally-occurring sequence, or a trRNA sequence with modifications or variations compared to naturally-occurring sequences. For clarity, the terms “guide RNA” or “guide” as used herein, and unless specifically stated otherwise, may refer to an RNA molecule (comprising A, C, G, and U nucleotides) or to a DNA molecule encoding such an RNA molecule (comprising A, C, G, and T nucleotides) or complementary sequences thereof. In general, in the case of a DNA nucleic acid construct encoding a guide RNA, the U residues in any of the RNA sequences described herein may be replaced with T residues, and in the case of a guide RNA construct encoded by any of the DNA sequences described herein, the T residues may be replaced with U residues.

[0121] As used herein, a “linker sequence” or “linker” is an amino acid sequence to link or connect multiple protein domains. A linker sequence can be “structured” or “unstructured.” A “structured linker” is rigid and functions to prohibit unwanted interactions between the discrete domains. An “unstructured linker” is a flexible linker defined by secondary structure.

[0122] As used herein, a “scaffold sequence,” also referred to as a tracrRNA, refers to a nucleic acid sequence that recruits an endonuclease to a target nucleic acid. Any scaffold sequence that comprises at least one stem loop structure and recruits an endonuclease is encompassed herein. Exemplary scaffold sequences will be evident to one of skill in the art and can be found for example in Jinek, et al. Science (2012) 337 (6096): 816-821, and Ran, et al. Nature Protocols (2013) 8: 2281-2308.

[0123] As used herein, a “spacer sequence,” sometimes also referred to herein and in the literature as a “spacer,” “protospacer,” “guide sequence,” or “targeting sequence” refers to a sequence within a guide RNA that is complementary to a target sequence and functions to direct a guide RNA to a target sequence for cleavage by an endonuclease, such as, Cas9. For clarity, the terms “spacer sequence”, “spacer,” “protospacer,” “guide sequence,” or “targeting sequence” as used herein, and unless specifically stated otherwise, may refer to an RNA molecule (comprising A, C, G, and U nucleotides) or to a DNA molecule encoding such an RNA molecule (comprising A, C, G, and T nucleotides) or complementary sequences thereof. A guide sequence can be 24, 23, 22, 21, 20 or fewer base pairs in length, e.g., in the case of Staphylococcus lugdunensis (i.e., SluCas9) or Staphylococcus aureus (i.e., SaCas9) and related Cas9 homologs/orthologs. A guide/spacer sequence in the case of SluCas9 or SaCas9 is at least 20 base pairs in length, or more specifically, within 20-25 base pairs in length (see, e.g., Schmidt et al., 2021, Nature Communications, “Improved CRISPR genome editing using small highly active and specific engineered RNA-guided nucleases”). Shorter or longer sequences can also be used as guides, e.g., 15-, 16-, 17-, 18-, 19-, 20-, 21-, 22-, 23-, 24-, or 25-nucleotides in length. For example, in some embodiments, the guide sequence comprises at least 17, 18, 19, 20, 21, 22, 23, 24, or 25 contiguous nucleotides. In some embodiments, the target sequence is in a gene or on a chromosome, for example, and is complementary to the guide sequence. In some embodiments, the degree of complementarity or identity between a guide sequence and its corresponding target sequence may be about 75%, 80%, 85%, 90%, 95%, 96%, 97%, 98%, 99%, or 100%. For example, in some embodiments, the guide sequence comprises a sequence with about 75%, 80%, 85%, 90%, 95%, 96%, 97%, 98%, 99%, or 100% identity to at least 17, 18, 19, 20, 21, 22, 23, 24, or 25 contiguous nucleotides of a target sequence. In some embodiments, the guide sequence comprises a sequence with about 75%, 80%, 85%, 90%, 95%, 96%, 97%, 98%, 99%, or 100% identity to a target sequence. In some embodiments, the guide sequence and the target region may be 100% complementary or identical. In other embodiments, the guide sequence and the target region may contain at least one mismatch. For example, the guide sequence and the target sequence may contain 1, 2, 3, or 4 mismatches, where the total length of the target sequence is at least 17, 18, 19, 20 or more base pairs. In some embodiments, the guide sequence and the target region may contain 1-4 mismatches where the guide sequence comprises at least 17, 18, 19, 20 or more nucleotides. In some embodiments, the guide sequence and the target region may contain 1, 2, 3, or 4 mismatches where the guide sequence comprises 20 nucleotides. In some embodiments, the guide sequence and the target region do not contain any mismatches.

[0124] Target sequences for endonucleases, such as Cas9s, include both the positive and negative strands of genomic DNA (i.e., the sequence given and the sequence's reverse compliment), as a nucleic acid substrate for a Cas9 is a double stranded nucleic acid. Accordingly, where a guide sequence is said to be “complementary to a target sequence”, it is to be understood that the guide sequence may direct a guide RNA to bind to the reverse complement of a target sequence. Thus, in some embodiments, where the guide sequence binds the reverse complement of a target sequence, the guide sequence is identical to certain nucleotides of the target sequence (e.g., the target sequence not including the PAM) except for the substitution of U for T in the guide sequence.

[0125] As used herein, “ribonucleoprotein” (RNP) or “RNP complex” refers to a guide RNA together with an endonuclease, such as a Cas9. In some embodiments, the guide RNA guides the endonuclease such as Cas9 to a target sequence, and the guide RNA hybridizes with and the RNP binds to the target sequence, which can be followed by cleaving or nicking (in the context of a modified “nickase” endonuclease).

[0126] As used herein, a first sequence is considered to “comprise a sequence with at least X % identity to” a second sequence if an alignment of the first sequence to the second sequence shows that X % or more of the positions of the second sequence in its entirety are matched by the first sequence. For example, the sequence AAGA comprises a sequence with 100% identity to the sequence AAG because an alignment would give 100% identity in that there are matches to all three positions of the second sequence. The differences between RNA and DNA (generally the exchange of uridine for thymidine or vice versa) and the presence of nucleoside analogs such as modified uridines do not contribute to differences in identity or complementarity among polynucleotides as long as the relevant nucleotides (such as thymidine, uridine, or modified uridine) have the same complement (e.g., adenosine for all of thymidine, uridine, or modified uridine; another example is cytosine and 5-methylcytosine, both of which have guanosine or modified guanosine as a complement). Thus, for example, the sequence 5′-AXG where X is any modified uridine, such as pseudouridine, N1-methyl pseudouridine, or 5-methoxyuridine, is considered 100% identical to AUG in that both are perfectly complementary to the same sequence (5′-CAU). Exemplary alignment algorithms are the Smith-Waterman and Needleman-Wunsch algorithms, which are well-known in the art. One skilled in the art will understand what choice of algorithm and parameter settings are appropriate for a given pair of sequences to be aligned; for sequences of generally similar length and expected identity >50% for amino acids or >75% for nucleotides, the Needleman-Wunsch algorithm with default settings of the Needleman-Wunsch algorithm interface provided by the EBI at the www.ebi.ac.uk web server is generally appropriate.

[0127] “mRNA” is used herein to refer to a polynucleotide that is not DNA and comprises an open reading frame that can be translated into a polypeptide (i.e., can serve as a substrate for translation by a ribosome and amino-acylated tRNAs). mRNA can comprise a phosphate-sugar backbone including ribose residues or analogs thereof, e.g., 2′-methoxy ribose residues. In some embodiments, the sugars of an mRNA phosphate-sugar backbone consist essentially of ribose residues, 2′-methoxy ribose residues, or a combination thereof.

[0128] As used herein, a “target sequence” refers to a sequence of nucleic acid in a target gene that has complementarity to at least a portion of the guide sequence of the guide RNA. The interaction of the target sequence and the guide sequence directs a Cas9 to bind, and potentially nick or cleave (depending on the activity of the agent), within or near the target sequence.

[0129] As used herein, “treatment” when used in the context of a disease or disorder refers to any administration or application of a therapeutic for a disease or disorder in a subject, and includes inhibiting the disease or development of the disease (which may occur before or after the disease is formally diagnosed, e.g., in cases where a subject has a genotype that has the potential or is likely to result in development of the disease), arresting its development, relieving one or more symptoms of the disease, curing the disease, or preventing reoccurrence of one or more symptoms of the disease. For example, treatment of DMD may comprise alleviating symptoms of DMD.

[0130] As used herein, “ameliorating” refers to any beneficial effect on a phenotype or symptom, such as reducing its severity, slowing or delaying its development, arresting its development, or partially or completely reversing or eliminating it. In the case of quantitative phenotypes such as expression levels, ameliorating encompasses changing the expression level so that it is closer to the expression level seen in healthy or unaffected cells or individuals.

[0131] A “pharmaceutically acceptable excipient” refers to an agent that is included in a pharmaceutical formulation that is not the active ingredient. Pharmaceutically acceptable excipients may e.g., aid in drug delivery or support or enhance stability or bioavailability.

[0132] The term “about” or “approximately” means an acceptable error for a particular value as determined by one of ordinary skill in the art, which depends in part on how the value is measured or determined.

[0133] As used herein, “Streptococcus pyogenes Cas9” may also be referred to as SpCas9, and includes wild type SpCas9 (e.g., SEQ ID NO: 730) and variants thereof. A variant of SpCas9 comprises one or more amino acid changes as compared to SEQ ID NO: 730, including insertion, deletion, or substitution of one or more amino acids, or a chemical modification to one or more amino acids. In some embodiments, the variant includes mutations at D10A or H840A (which creates a single-strand nickase), or mutations at D10A and H840A (which abrogates nuclease activity; this mutant is known as dead Cas9 or dCas9).

[0134] As used herein, “Staphylococcus aureus Cas9” may also be referred to as SaCas9, and includes wild type SaCas9 (e.g., SEQ ID NO: 711) and variants thereof. A variant of SaCas9 comprises one or more amino acid changes as compared to SEQ ID NO: 711, including insertion, deletion, or substitution of one or more amino acids, or a chemical modification to one or more amino acids. For clarity, SaCas9KKH is a SaCas9 variant.

[0135] As used herein, “Staphylococcus lugdunensis Cas9” may also be referred to as SluCas9, and includes wild type SluCas9 (e.g., SEQ ID NO: 712) and variants thereof. A variant of SluCas9 comprises one or more amino acid changes as compared to SEQ ID NO: 712, including insertion, deletion, or substitution of one or more amino acids, or a chemical modification to one or more amino acids.

### II. Nucleic Acids Encoding tgRNAs and Compositions Containing Same

[0136] Provided herein are nucleic acids encoding tandem guide RNAs and compositions comprising the same, that can be used in genome editing applications, such as, for example, to treat diseases and disorders that would benefit from the excision of an exon, intron, or exon-intron junction. In some embodiments, when combined with an endonuclease or nucleic acid encoding an endonuclease, tgRNAs are able to make two cleavages to excise small or large portions of a genome. As an exemplary, non-limiting example, tandem guide RNAs (tgRNAs) of the present disclosure, when used with the correct endonuclease, may function to precisely delete a portion of exon 45, 51, or 53 of the DMD gene. Table 2 provides a listing of exemplary linkers. Tables 3 and 6 provide listings of exemplary guide sequences of guide RNAs, and Tables 4A-B and 5 provide detailed information regarding exemplary tgRNAs.

Tandem Guide RNAs (tgRNAs)

[0137] Provided herein are tandem RNAs (tgRNAs), which also may be referred to as fused guide RNAs (fgRNAs), and which comprise at least two different sgRNAs (e.g., two sgRNAs) connected via a linker. In some embodiments, the sgRNAs are for use with the same class, type, subtype, and/or species of endonuclease. In some embodiments, the sgRNAs (such as a first sgRNA and a second sgRNA) are for use with a SluCas9 endonuclease. In some embodiments a first sgRNA and a second sgRNA are for use with a SluCas9 endonuclease, and the first sgRNA comprises the nucleotide sequence of SEQ ID NO: 384 and the second sgRNA comprises the nucleotide sequence of SEQ ID NO: 391 or SEQ ID NO: 249. In some embodiments, tgRNAs are capable of inducing multiple independent edits, e.g., in a gene, when paired with one or more endonucleases, e.g., to excise an exon, intron, or exon-intron junction. The linker can be flexible or rigid, and vary in length. Exemplary linkers are at least 10, 20, 30, 40, 50, 100, or 150 nucleotides (or any length that allows function of the two sgRNAs).

[0138] In some embodiments, the variable linker length allows the first sgRNA and second sgRNA to target a location in a genome that is separated by about 0, 20, 30, 40, 50, 100, 150, 200, 250, 300, 350, 400, 450, 500, 600, 700, 800, 900, 1000, 2000, 3000, 4000, 5000, 6000, 7000, 8000, 9000, or 10000 nucleotides. It is further understood that the variable length allows the first sgRNA to target a location in a genome that is separated by about 0-20, 20-10,000, 20-5,000, 20-1,000, 20-500, 20-250, 50-10,000, 50-5,000, 50-1,000, 50-500, 50-250, 100-10,000, 100-1,000, 100-500, 100-250, 200-10,000, 200-5,000, 200-1,000, 200-500, 500-10,000, 500-5,000, 500-1,000, 1,000-10,000, 1,000-5,000, or 5,000-10,000 nucleotides from the location targeted by the second sgRNA.

[0139] The orientation of tgRNAs is also variable and can be modulated depending on the target sequence. In some embodiments, the orientation of both sgRNAs in a tgRNA may be in the same orientation as the target strand (that is, wherein the 5′ end of the first sgRNA aligns with the 3′ end of the target strand, and the 3′ of the second sgRNA aligns with the 5′ end of the target strand, with the linker substantially linear in the center). Another orientation is also possible, wherein the strands are “opposite,” which for example could mean that the 3′ end of the first sgRNA aligns with the 3′ end of the target strand and the 5′ end of the second sgRNA aligns with the 5′ end of the target strand, and the linker. In some embodiments, the tgRNA comprises a first sgRNA that targets a first site in a target nucleic acid, and the second sgRNA targets a second site that is 5′ to the first site in the target nucleic acid. In some embodiments, the tgRNA comprises a first sgRNA that targets a first site in a target nucleic acid, and the second sgRNA targets a second site that is 3′ to the first site in the target nucleic acid. In some embodiments, the tgRNA comprises a first sgRNA that targets one strand of a target nucleic acid (e.g., a sense strand) and a second sgRNA that targets the same strand of the target nucleic acid (e.g., also the sense strand). In some embodiments, the tgRNA comprises a first sgRNA that targets one strand of a target nucleic acid (e.g., a sense strand) and a second sgRNA that targets a different strand of the target nucleic acid (e.g., an antisense strand). In some embodiments, both the first and second sgRNAs in a tgRNA target the same strand of a target nucleic acid. In some embodiments, the first sgRNA in a tgRNA targets the sense strand of a target nucleic acid, and the second sgRNA in the tgRNA also targets the sense strand of the target nucleic acid. In some embodiments, the first sgRNA in a tgRNA targets the antisense strand of a target nucleic acid, and the second sgRNA in the tgRNA also targets the antisense strand of the target nucleic acid. In some embodiments, the first sgRNA in a tgRNA targets the sense strand of a target nucleic acid, and the second sgRNA in the tgRNA targets the antisense strand of the target nucleic acid. In some embodiments, the first sgRNA in a tgRNA targets the antisense strand of a target nucleic acid, and the second sgRNA in the tgRNA targets the sense strand of the target nucleic acid.

[0140] In some embodiments, the first sgRNA in a tgRNA targets a genomic region that is downstream of the genomic region targeted by the second sgRNA in the tgRNA. In some embodiments, the second sgRNA in a tgRNA targets a genomic region that is downstream of the genomic region targeted by the first sgRNA in the tgRNA.

[0141] In some embodiments, the tgRNAs are used with the same class, type, subtype, and/or species endonuclease, or a nucleic acid encoding the same endonuclease, to make two cleavages in a genome and thereby excise a portion of the genome. Several species of endonuclease may be used with the tgRNAs, as described in more detail below.

[0142] In particular embodiments, tgRNAs comprise two distinct spacers and thereby target two genomic loci. The tgRNA may also be capable of localizing a donor template to an endonuclease-induced double strand break at a tgRNA-specified genomic locus to facilitate gene correction and/or insertion. In one embodiment, one spacer sequence of the tgRNA will be designed to target the desired genomic locus and create a double strand break (DSB) while also targeting the donor template with the second tgRNA spacer.

[0143] Donor constructs may be linear DNA with Cas/tgRNA localizing the donor to the genomic DSB, or donors may be circularized with Cas/tgRNA functioning both to localize the donor to the genomic DSB and linearizing the donor template. Donors may have flanking regions of homologous sequence to the targeted genomic locus to enable homology directed repair. Alternatively, donors bearing no homology arms can be inserted into the genomic DSB via non-homologous end joining. Additional embodiments may include a single tgRNA bridging between genome and donor, or administration of multiple tgRNA to allow creation of multiple double strand breaks (in genome and/or in donor) and additional bridging interactions between genome and donor.

[0144] In particular embodiments, a tgRNA comprises a nucleotide sequence having at least 80%, at least 85%, at least 90%, at least 95%, at least 96%, at least 97%, at least 98%, at least 99%, or 100% sequence identity to any one of the tgRNA sequences of Table 5 (SEQ ID NOs: 121-178. In other particular embodiments, a tgRNA comprises a nucleotide sequence having at least 80%, at least 85%, at least 90%, at least 95%, at least 96%, at least 97%, at least 98%, at least 99%, or 100% sequence identity to any one of the tgRNA sequences of SEQ ID NOs: 121-154 or 157-178.

sgRNAs

[0145] The single guide RNAs (sgRNAs) linked in a tgRNA may comprise a targeting sequence (crRNA sequence) and Cas9 nuclease-recruiting sequence (tracrRNA). The sgRNAs may be the same sequence, or different sequences. In particular embodiments, the sgRNAs in a tgRNA each comprise different sequences. The sgRNAs may be designed to target a specific region of the genome, e.g., a target gene. The sgRNAs comprise a spacer sequence, which may be any 25-mer, any 24-mer, any 23-mer, any 22-mer, any 21-mer, any 20-mer, any 19-mer, any 18-mer or any 17-mer (depending on the chosen endonuclease), or any other nucleic acid sequence that is homologous to a region in the gene of interest and will direct an endonuclease to a chosen location.

[0146] In some aspects, the disclosure comprises compositions comprising tgRNAs targeting a portion of a genome, such as a DMD exon (e.g., any of exons 2, 3, 6, 9, 44, 45, 47, 48, 50, 51 or 53), or a specific repeat pattern in a genome. In some embodiments, one or both of the sgRNAs within the tgRNA target a trinucleotide repeat in a genome. In some embodiments, the tgRNA is constructed such that each sgRNAs in the tgRNA interacts with the same class, type, subtype and/or species of endonuclease. In some embodiments, the endonuclease is SpCas9. In some embodiments, the endonuclease is saCas9. In some embodiments, the endonuclease is sluCas9. In some embodiments, the endonuclease is Cas12i2. In some embodiments, the endonuclease is Cpf1. In some embodiments, the endonuclease is Cas ϕ. In some embodiments, the spacer component is substantially complementary to a target sequence, such as a DMD exon (e.g., any of exons 2, 3, 6, 9, 44, 45, 47, 48, 50, 51 or 53), wherein the DMD target sequence is adjacent to a 5′-NTTN-3′ PAM sequence as described herein. In the case of a double-stranded target, the sgRNA guide binds to a first strand of the target (i.e., the target strand or the spacer-complementary strand) and a PAM sequence as described herein is present in the second, complementary strand (i.e., the non-target strand or the non-spacer-complementary strand).

[0147] In some embodiments, a nucleic acid is provided, comprising a first sgRNA connected to a second sgRNA via a linker, wherein the sgRNAs are for use with the same class, type, subtype, and/or species of endonuclease. In some embodiments, the endonuclease is a Cas9 endonuclease. In further embodiments, the Cas9 nuclease is isolated or derived from Staphylococcus aureus (SaCas9) or Staphylococcus lugdunensis (SluCas9). In some embodiments, a nucleic acid is provided, comprising a first sgRNA connected to a second sgRNA via a linker, wherein the sgRNAs are for use with a SaCas9. In some embodiments, a nucleic acid is provided, comprising a first sgRNA connected to a second sgRNA via a linker, wherein the sgRNAs are for use with a SluCas9.

[0148] In some embodiments, the linker is between 1 and 250 nucleotides. In some embodiments, the linker is about between 1 and 10, about 10, about 20, about 30, about 40, about 50, about 100, or about 200 nucleotides. In some embodiments, the linker is any one of SEQ ID NOs: 100-106 or 112-120. In some embodiments, the linker is any one of SEQ ID NOs: 100-106, 112-114, or 117-120. In some embodiments, the linker is between 1-10, 5-50, 10-50, 20-50, 30-50, 40-50, 40-100, 60-100, 80-100, 80-200, 100-200, or 150-200 nucleotides in length. In particular embodiments, the linker is between 10-100 or between 20-50 nucleotides in length. In other particular embodiments, the linker is greater than 16 nucleotides in length. In some embodiments, the linker is between 17-25 nucleotides in length. In some embodiments, the linker does not comprise a secondary structure. In some embodiments, the linker is not a structured linker. In some embodiments, the linker is shorter (e.g., more than 10, 25, 50, 75, or 100 nucleotides shorter) in nucleotide length than the nucleotide length between the region in the genome targeted by the first sgRNA in the tgRNA and the region in the genome targeted by the second sgRNA in the tgRNA. In some embodiments, the linker is greater (e.g., more than 10, 25, 50, 75, or 100 nucleotides greater) in nucleotide length than the nucleotide length between the region in the genome targeted by the first gRNA in the tgRNA and the region in the genome targeted by the second gRNA in the tgRNA. In some embodiments, the linker comprises a ribozyme cleavage site. In some embodiments, the linker comprises a ribozyme cleavage site which is a hammerhead ribozyme cleavage site.

[0149] In some embodiments, any of the nucleic acids disclosed herein comprises a linker that is not cleavable under physiological conditions. In some embodiments, the linker is not processed to result in separate sgRNA molecules. In some embodiments, if any of the nucleic acid disclosed herein (e.g., a nucleic acid comprising a first sgRNA joined to a second sgRNA by means of a linker) is administered to a cell (e.g., in an organism, such as a human), the linker is not processed to result in separate sgRNA molecules (e.g., the linker is not cleaved or hydrolyzed to separate the first sgRNA from the second sgRNA). In some embodiments, if a plurality of nucleic acids each comprising a first sgRNA joined to a second sgRNA by means of a linker are administered to a cell or an organism, than no more than 1%, 2%, 3%, 5%, 10%, 15%, 20%, 25%, 30%, 40%, 50%, or 60% of the nucleic acids administered to the cell or organism are processed to result in separate sgRNA molecules. In some embodiments, the disclosure provides for a method of treating a subject (e.g., a subject having DMD), comprising treating the subject with a plurality of nucleic acids comprising a first sgRNA joined to a second sgRNA by means of a linker, wherein less than 60%, 50%, 40%, 30%, 25%, 20%, 15%, 10%, 5%, 3%, 2%, or 1% of the plurality of nucleic acids administered to the subject are processed within the subject to result in separate sgRNA molecules. In some embodiments, the disclosure provides for a method of treating a subject (e.g., a subject having DMD), comprising treating the subject with a plurality of nucleic acids comprising a first sgRNA joined to a second sgRNA by means of a linker, wherein 1-60%, 1-40%, 1-20%, 1-10%, 1-5%, 5-60%, 5-40%, 5-20%, 5-10%, 10-60%, 10-40%, 10-20%, 25-60%, 25-40%, or 40-60% of the plurality of nucleic acids administered to the subject are processed within the subject to result in separate sgRNA molecules.

[0150] In some embodiments, the linker comprises at least one guanine. In some embodiments, the linker comprises at least 1, 2, 3, 4, 5, 6, 7, 8, 9, or 10 guanines. In some embodiments, the linker comprises at least one cytosine. In some embodiments, the linker comprises at least 1, 2, 3, 4, 5, 6, 7, 8, 9, or 10 cytosines. In some embodiments, the linker has a guanine and cytosine (GC) content of 5-40% (i.e., between 5-40% of the nucleotides in the linker are guanine and/or cytosine), such as 5%, 6%, 7%, 8%, 9%, 10%, 11%, 12%, 130%, 14%, 15%, 16%, 17%, 18%, 19%, 20%, 21%, 22%, 23%, 24%, 25%, 26%, 27%, 28%, 29%, 30%, 31%, 32%, 33%, 34%, 35%, 36%, 37%, 38%, 39%, or 40% GC. In some embodiments, the linker has a GC content of 5-40%, such as 5-35%, 5-30%, 5-25%, 5-20%, 10-40%, 10-35%, 10-30%, 10-25%, 10-20%, 15-40%, 15-35%, 15-30%, or 15-25% GC content. In some embodiments, the linker does not comprise guanine or cytosine.

[0151] In some embodiments, a composition is provided comprising a nucleic acid comprising a first sgRNA connected to a second sgRNA via a linker, wherein the sgRNAs are for use with the same class, type, subtype, and/or species of endonuclease and optionally further comprising an endonuclease or a nucleic acid encoding an endonuclease. In particular embodiments, the nucleic acid encoding the endonuclease and the two sgRNAs are on different vectors. In other embodiments, the nucleic acid encoding the endonuclease and the two sgRNAs are on the same vector. In some embodiments, the composition further comprises a template nucleic acid sequence.

[0152] In some embodiments, any of the nucleic acids disclosed herein (e.g., any of the tgRNAs disclosed herein) or composition comprising said nucleic acid targets a region of the human DMD gene. In some embodiments, the region is an exon. In some embodiments, the region is an intron. In some embodiments, one of the sgRNAs in the nucleic acid (e.g., tgRNA) targets an exon and one of the sgRNAs in the nucleic acid targets an intron. In some embodiments, the nucleic acid or composition targets exon 45, 51, or 53 of the human DMD gene. In some embodiments, the tgRNAs are capable of excising a DNA fragment from the DMD gene, wherein the DNA fragment is between 5 and 250 nucleotides in length. In particular embodiments, the excised DMD fragment does not comprise an entire exon of the DMD gene.

[0153] In some embodiments, the tgRNAs are associated with a lipid nanoparticle, or encoded by a viral vector. In some embodiments, the viral vector is an adeno-associated virus vector, a lentiviral vector, an integrase-deficient lentiviral vector, an adenoviral vector, a vaccinia viral vector, an alphaviral vector, or a herpes simplex viral vector. In some embodiments, the viral vector is an adeno-associated virus (AAV) vector. In some embodiments, the AAV vector is an AAV1, AAV2, AAV3, AAV4, AAV5, AAV6, AAV7, AAV8, or AAV9 vector, wherein the number following AAV indicates the AAV serotype. In a preferred embodiment, the AAV vector is an AAV serotype 9 vector (AAV9).

[0154] In some embodiments, a composition is provided comprising a nucleic acid (e.g., tgRNA) comprising two sgRNAs, wherein the sgRNAs are linked, and wherein the first sgRNA targets a location in a genome that is separated by no more than 150, 200, 250, 300, 350, 400, 450, 500, 600, 700, 800, 900, 1000, 2000, 3000, 4000, 5000, 6000, 7000, 8000, 9000, or 10000 nucleotides from the location targeted by the second sgRNA. In some embodiments, the first sgRNA targets a location in a genome that is separated by 20-10,000, 20-5,000, 20-1,000, 20-500, 20-250, 50-10,000, 50-5,000, 50-1,000, 50-500, 50-250, 100-10,000, 100-1,000, 100-500, 100-250, 200-10,000, 200-5,000, 200-1,000, 200-500, 500-10,000, 500-5,000, 500-1,000, 1,000-10,000, 1,000-5,000, or 5,000-10,000 nucleotides from the location targeted by the second sgRNA.

[0155] In some embodiments, the first sgRNA of the nucleic acid (e.g., tgRNA) or composition targets a genomic region that is downstream of the genomic region targeted by the second sgRNA of the nucleic acid or composition. In some embodiments, the second sgRNA of the nucleic acid or composition targets a genomic region that is downstream of the genomic region targeted by the first sgRNA of the nucleic acid or composition. In some embodiments, the first gRNA and the second gRNA of the nucleic acid or composition are in the same orientation. In some embodiments, the first gRNA and the second gRNA of the nucleic acid or composition are in opposite orientations.

[0156] In some embodiments, the first sgRNA of the nucleic acid or composition comprises a first scaffold, wherein the second sgRNA of the nucleic acid or composition comprises a second scaffold, and wherein the first scaffold and the second scaffold are capable of selectively interacting with the same class, type, subtype and/or species of endonuclease. In some embodiments, the first scaffold nucleotide sequence differs from the second scaffold nucleotide sequence by no more than 1, 2, 3, 4, 5, 6, 7, 8, 9, or 10 nucleotides. In some embodiments, the first scaffold nucleotide sequence is identical to the second scaffold nucleotide sequence. In some embodiments, the first scaffold and the second scaffold each comprise the nucleotide sequence of any one of SEQ ID Nos: 501-504, 601, or 900-917. In a preferred embodiment, the wherein the first scaffold and the second scaffold each comprise the nucleotide sequence of SEQ ID No: 901.

[0157] In some embodiments, the disclosure provides a nucleic acid or composition, wherein the nucleic acid comprises from 5′ to 3′: a) a promoter for expression of a first gRNA and a second gRNA, a first gRNA, a first gRNA scaffold, a linker, a second gRNA, a second gRNA scaffold; b) a promoter for expression of a first gRNA and a second gRNA, the reverse complement of a first gRNA scaffold, the reverse complement of a first gRNA scaffold, a linker, a second gRNA, and a second gRNA scaffold; c) a promoter for expression of a first gRNA and a second gRNA, a first gRNA, a first gRNA scaffold, a linker, the reverse complement of a second gRNA scaffold, and the reverse complement of a second gRNA scaffold; d) a promoter for expression of an endonuclease, a gene encoding an endonuclease, a promoter for expression of a first gRNA and a second gRNA, a first gRNA, a first gRNA scaffold, a linker, a second gRNA, a second gRNA scaffold; e) a promoter for expression of an endonuclease, a gene encoding an endonuclease, a promoter for expression of a first gRNA and a second gRNA, the reverse complement of a first gRNA scaffold, the reverse complement of a first gRNA scaffold, a linker, a second gRNA, and a second gRNA scaffold; f) a promoter for expression of an endonuclease, a gene encoding an endonuclease, a promoter for expression of a first gRNA and a second gRNA, a first gRNA, a first gRNA scaffold, a linker, the reverse complement of a second gRNA scaffold, and the reverse complement of a second gRNA scaffold; g) a promoter for expression of a first gRNA and a second gRNA, a first gRNA, a first gRNA scaffold, a linker, a second gRNA, a second gRNA scaffold, a promoter for expression of an endonuclease, a gene encoding an endonuclease; h) a promoter for expression of a first gRNA and a second gRNA, the reverse complement of a first gRNA scaffold, the reverse complement of a first gRNA scaffold, a linker, a second gRNA, and a second gRNA scaffold, a promoter for expression of an endonuclease, a gene encoding an endonuclease; i) a promoter for expression of a first gRNA and a second gRNA, a first gRNA, a first gRNA scaffold, a linker, the reverse complement of a second gRNA scaffold, and the reverse complement of a second gRNA scaffold, a promoter for expression of an endonuclease, a gene encoding an endonuclease; j) the reverse complement of a gene encoding an endonuclease, the reverse complement of a promoter of a gene encoding an endonuclease, a promoter for expression of a first gRNA and a second gRNA, a first gRNA, a first gRNA scaffold, a linker, a second gRNA, a second gRNA scaffold; k) the reverse complement of a gene encoding an endonuclease, the reverse complement of a promoter of a gene encoding an endonuclease, a promoter for expression of a first gRNA and a second gRNA, the reverse complement of a first gRNA scaffold, the reverse complement of a first gRNA scaffold, a linker, a second gRNA, and a second gRNA scaffold; 1) the reverse complement of a gene encoding an endonuclease, the reverse complement of a promoter of a gene encoding an endonuclease, a promoter for expression of a first gRNA and a second gRNA, a first gRNA, a first gRNA scaffold, a linker, the reverse complement of a second gRNA scaffold, and the reverse complement of a second gRNA scaffold; m) a promoter for expression of a first gRNA and a second gRNA, a first gRNA, a first gRNA scaffold, a linker, a second gRNA, a second gRNA scaffold, the reverse complement of a gene encoding an endonuclease, the reverse complement of a promoter of a gene encoding an endonuclease; n) a promoter for expression of a first gRNA and a second gRNA, the reverse complement of a first gRNA scaffold, the reverse complement of a first gRNA scaffold, a linker, a second gRNA, and a second gRNA scaffold, the reverse complement of a gene encoding an endonuclease, the reverse complement of a promoter of a gene encoding an endonuclease; o) or a promoter for expression of a first gRNA and a second gRNA, a first gRNA, a first gRNA scaffold, a linker, the reverse complement of a second gRNA scaffold, and the reverse complement of a second gRNA scaffold, the reverse complement of a gene encoding an endonuclease, the reverse complement of a promoter of a gene encoding an endonuclease.

### Scaffold Sequences

[0158] In some embodiments, each of the guide sequences in a tgRNA further comprises a scaffold sequence.

[0159] A single-molecule guide RNA (sgRNA) can comprise, in the 5′ to 3′ direction, an optional spacer extension sequence, a spacer sequence, a minimum CRISPR repeat sequence, a single-molecule guide linker, a minimum tracrRNA sequence, a 3′ tracrRNA sequence and/or an optional tracrRNA extension sequence. The optional tracrRNA extension can comprise elements that contribute additional functionality (e.g., stability) to the guide RNA. The single-molecule guide linker can link the minimum CRISPR repeat and the minimum tracrRNA sequence to form a hairpin structure. The optional tracrRNA extension can comprise one or more hairpins. In particular embodiments, the disclosure provides for an sgRNA comprising a spacer sequence and a tracrRNA sequence.

[0160] The guide RNA can be considered to comprise a scaffold sequence necessary for endonuclease binding and a spacer sequence required to bind to the genomic target sequence. An exemplary scaffold sequence suitable for use with SaCas9 to follow the guide sequence at its 3′ end is: GTTTAAGTACTCTGTGCTGGAAACAGCACAGAATCTACTTAAACAAGGCAAAATGCCGT GTTTATCTCGTCAACTTGTTGGCGAGA (SEQ ID NO: 500) in 5′ to 3′ orientation. In some embodiments, an exemplary scaffold sequence for use with SaCas9 to follow the 3′ end of the guide sequence is a sequence that is at least 80%, 85%, 90%, 91%, 92%, 93%, 94%, 95%, 96%, 97%, 98%, 99% or 100% identical to SEQ ID NO: 500, or a sequence that differs from SEQ ID NO: 500 by no more than 1, 2, 3, 4, 5, 10, 15, 20, or 25 nucleotides.

[0161] In some embodiments, a variant of an SaCas9 scaffold sequence may be used. In some embodiments, the SaCas9 scaffold to follow the guide sequence at its 3′ end is referred to as “SaScaffoldV1” and is: GTTTTAGTACTCTGGAAACAGAATCTACTAAAACAAGGCAAAATGCCGTGTTTATCTCGT CAACTTGTTGGCGAGAT (SEQ ID NO: 501) in 5′ to 3′ orientation. In some embodiments, an exemplary scaffold sequence for use with SaCas9 to follow the 3′ end of the guide sequence is a sequence that is at least 80%, 85%, 90%, 91%, 92%, 93%, 94%, 95%, 96%, 97%, 98%, 99% or 100% identical to SEQ ID NO: 501, or a sequence that differs from SEQ ID NO: 501 by no more than 1, 2, 3, 4, 5, 10, 15, 20, or 25 nucleotides.

[0162] In some embodiments, a variant of an SaCas9 scaffold sequence may be used. In some embodiments, the SaCas9 scaffold to follow the guide sequence at its 3′ end is referred to as “SaScaffoldV2” and is: GTTTAAGTACTCTGTGCTGGAAACAGCACAGAATCTACTTAAACAAGGCAAAATGCCGT GTTTATCTCGTCAACTTGTTGGCGAGAT (SEQ ID NO: 502) in 5′ to 3′ orientation. In some embodiments, an exemplary scaffold sequence for use with SaCas9 to follow the 3′ end of the guide sequence is a sequence that is at least 80%, 85%, 90%, 91%, 92%, 93%, 94%, 95%, 96%, 97%, 98%, 99% or 100% identical to SEQ ID NO: 502, or a sequence that differs from SEQ ID NO: 502 by no more than 1, 2, 3, 4, 5, 10, 15, 20, or 25 nucleotides.

[0163] In some embodiments, a variant of an SaCas9 scaffold sequence may be used. In some embodiments, the SaCas9 scaffold to follow the guide sequence at its 3′ end is referred to as “SaScaffoldV3” and is: GTTTAAGTACTCTGGAAACAGAATCTACTTAAACAAGGCAAAATGCCGTGTTTATCTCGT CAACTTGTTGGCGAGAT (SEQ ID NO: 503) in 5′ to 3′ orientation. In some embodiments, an exemplary scaffold sequence for use with SaCas9 to follow the 3′ end of the guide sequence is a sequence that is at least 80%, 85%, 90%, 91%, 92%, 93%, 94%, 95%, 96%, 97%, 98%, 99% or 100% identical to SEQ ID NO: 503, or a sequence that differs from SEQ ID NO: 503 by no more than 1, 2, 3, 4, 5, 10, 15, 20, or 25 nucleotides.

[0164] In some embodiments, a variant of an SaCas9 scaffold sequence may be used. In some embodiments, the SaCas9 scaffold to follow the guide sequence at its 3′ end is referred to as “SaScaffoldV5” and is: GTTTCAGTACTCTGGAAACAGAATCTACTGAAACAAGGCAAAATGCCGTGTTTATCTCGT CAACTTGTTGGCGAGAT (SEQ ID NO: 504) in 5′ to 3′ orientation. In some embodiments, an exemplary scaffold sequence for use with SaCas9 to follow the 3′ end of the guide sequence is a sequence that is at least 80%, 85%, 90%, 91%, 92%, 93%, 94%, 95%, 96%, 97%, 98%, 99% or 100% identical to SEQ ID NO: 504, or a sequence that differs from SEQ ID NO: 504 by no more than 1, 2, 3, 4, 5, 10, 15, 20, or 25 nucleotides.

[0165] Two exemplary scaffold sequences suitable for use with SluCas9 to follow the guide sequence at its 3′ end is: GTTTTAGTACTCTGGAAACAGAATCTACTGAAACAAGACAATATGTCGTGTTTATCCCAT CAATTTATTGGTGGGA (SEQ ID NO: 600), and GTTTAAGTACTCTGTGCTGGAAACAGCACAGAATCTACTGAAACAAGACAATATGTCGT GTTTATCCCATCAATTTATTGGTGGGA (SEQ ID NO: 601) in 5′ to 3′ orientation. In some embodiments, an exemplary sequence for use with SluCas9 to follow the 3′ end of the guide sequence is a sequence that is at least 80%, 85%, 90%, 91%, 92%, 93%, 94%, 95%, 96%, 97%, 98%, 99% or 100% identical to SEQ ID NO: 600 or SEQ ID NO: 601, or a sequence that differs from SEQ ID NO: 600 or SEQ ID NO: 601 by no more than 1, 2, 3, 4, 5, 10, 15, 20, or 25 nucleotides.

[0166] Exemplary scaffold sequences suitable for use with SluCas9 to follow the guide sequence at its 3′ end are also shown in Table 1 below in the 5′ to 3′ orientation.

TABLE 1

| | | | | Streak of |
|---|---|---|---|---|
| | | | | Homology to |
| Scaffold | SEQ | | Homology | Slu v5 |
| ID | ID NO | Scaffold Sequence (5′ to 3′) | to Slu v5 | (# nucleotides) |
| Wildtype | 900 | GTTTTAGTACTCTGGAAACAGAATCTACTGAA | N/A | N/A |
| | | ACAAGACAATATGTCGTGTTTATCCCATCAAT | | |
| | | TTATTGGTGGGAT | | |
| Slu- | 601 | GTTTAAGTACTCTGTGCTGGAAACAGCACAG | N/A | N/A |
| VCGT- | | AATCTACTGAAACAAGACAATATGTCGTGTTT | | |
| 4.5 (also | | ATCCCATCAATTTATTGGTGGGA | | |
| referred | | | | |
| to herein | | | | |
| as “v2”) | | | | |
| Slu_v5 | 901 | GTTTCAGTACTCTGGAAACAGAATCTACTGAA | 100.00% | 77 |
| | | ACAAGACAATATGTCGTGTTTATCCCATCAAT | | |
| | | TTATTGGTGGGAT | | |
| Slu_v5-1 | 902 | GTTTggTaACcTaGGAAACTagATCTTaccAAACA | 87.50% | 47 |
| | | AGACAATATGTCGTGTTTATCCCATCAATTTA | | |
| | | TTGGTGGGAT | | |
| Slu_v5-2 | 903 | GTTTCAGTACTCTGGAAACAGAATCTACTGAA | 96.10% | 37 |
| | | ACAAGgCAAaATGcCGTGTTTATCCCATCAATT | | |
| | | TATTGGTGGGAT | | |
| Slu_v5-3 | 904 | GTTTCAGTACTCTGGAAACAGAATCTACTGAA | 94.81% | 48 |
| | | ACAAGACAATATGTCGcgcccaTCCCATCAATTT | | |
| | | ATTGGTGGGAT | | |
| Slu_v5-4 | 905 | GTTTCAGTACTCTGGAAACAGAATCTACTGAA | 91.55% | 55 |
| | | ACAAGACAATATGTCGTGTTTATgggTTgAATT | | |
| | | TATTcGacccAT | | |
| Slu_v5-5 | 906 | GTTTggTaACcTaGGAAACTagATCTTaccAAACA | 83.75% | 31 |
| | | AGgCAAaATGcCGTGTTTATCCCATCAATTTAT | | |
| | | TGGTGGGAT | | |
| Slu_v5-6 | 907 | GTTTggTaACcTaGGAAACTagATCTTaccAAACA | 82.50% | 23 |
| | | AGACAATATGTCGcgcccaTCCCATCAATTTATT | | |
| | | GGTGGGAT | | |
| Slu_v5-7 | 908 | GTTTggTaACcTaGGAAACTagATCTTaccAAACA | 78.38% | 25 |
| | | AGACAATATGTCGTGTTTATgggTTgAATTTAT | | |
| | | TcGacccAT | | |
| Slu_v5-8 | 909 | GTTTCAGTACTCTGGAAACAGAATCTACTGAA | 90.91% | 37 |
| | | ACAAGgCAAaATGcCGcgcccaTCCCATCAATTTA | | |
| | | TTGGTGGGAT | | |
| Slu_v5-9 | 910 | GTTTCAGTACTCTGGAAACAGAATCTACTGAA | 87.32% | 37 |
| | | ACAAGgCAAaATGcCGTGTTTATgggTTgAATTT | | |
| | | ATTcGacccAT | | |
| Slu_v5- | 911 | GTTTCAGTACTCTGGAAACAGAATCTACTGAA | 82.89% | 48 |
| 10 | | ACAAGACAATATGTCGcgcccaTgggTTgAATTTA | | |
| | | TTcGacccAT | | |
| Slu_v5- | 912 | GTTTggTaACcTaGGAAACTagATCTTaccAAACA | 78.75% | 23 |
| 11 | | AGgCAAaATGcCGcgcccaTCCCATCAATTTATTG | | |
| | | GTGGGAT | | |
| Slu_v5- | 913 | GTTTggTaACcTaGGAAACTagATCTTaccAAACA | 74.32% | 9 |
| 12 | | AGgCAAaATGcCGTGTTTATgggTTgAATTTATTc | | |
| | | GacccAT | | |
| Slu_v5- | 914 | GTTTggTaACcTaGGAAACTagATCTTaccAAACA | 70.89% | 18 |
| 13 | | AGACAATATGTCGcgcccaTgggTTgAATTTATTc | | |
| | | GacccAT | | |
| Slu_v5- | 915 | GTTTCAGTACTCTGGAAACAGAATCTACTGAA | 78.95% | 37 |
| 14 | | ACAAGgCAAaATGcCGcgcccaTgggTTgAATTTAT | | |
| | | TcGacccAT | | |
| Slu_v5- | 916 | GTTTggTaACcTaGGAAACTagATCTTaccAAACA | 67.09% | 8 |
| 15 | | AGgCAAaATGcCGcgcccaTgggTTgAATTTATTcGa | | |
| | | cccAT | | |
| Slu_v4 | 917 | GTTTCAGTACTCTGTGCTGGAAACAGCACAGA | N/A | N/A |
| | | ATCTACTGAAACAAGACAATATGTCGTGTTTA | | |
| | | TCCCATCAATTTATTGGTGGGAT | | |

[0167] In some embodiments, the scaffold sequence suitable for use with SaCas9 to follow the guide sequence at its 3′ end is selected from any one of SEQ ID NOs: 500-504 in 5′ to 3 orientation. In some embodiments, an exemplary sequence for use with SaCas9 to follow the 3′ end of the guide sequence is a sequence that is at least 65%, 70%, 75%, 80%, 85%, 90%, 91%, 92%, 93%, 94%, 95%, 96%, 97%, 98%, 99% or 100% identical to any one off SEQ ID NOs: 500-504, or a sequence that differs from any one of SEQ ID NOs: 500-504 by no more than 1, 2, 3, 4, 5, 10, 15, 20, or 25 nucleotides.

[0168] In some embodiments, the scaffold sequence suitable for use with SluCas9 to follow the guide sequence at its 3′ end is selected from any one of SEQ ID NOs: 900 or 601, or 901-917 in 5′ to 3 orientation. In some embodiments, an exemplary sequence for use with SluCas9 to follow the 3′ end of the guide sequence is a sequence that is at least 65%, 70%, 75%, 80%, 85%, 90%, 91%, 92%, 93%, 94%, 95%, 96%, 97%, 98%, 99% or 100% identical to any one off SEQ ID NOs: 900 or 601, or 901-917, or a sequence that differs from any one of SEQ ID NOs: 900 or 601, or 901-917 by no more than 1, 2, 3, 4, 5, 10, 15, 20, or 25 nucleotides.

[0169] In some embodiments, the nucleic acid encoding the tgRNA comprises a sequence comprising SEQ ID NO: 500. In some embodiments, the nucleic acid encoding the tgRNA comprises a sequence comprising SEQ ID NO: 501. In some embodiments, the nucleic acid encoding the tgRNA comprises a sequence comprising SEQ ID NO: 502. In some embodiments, the nucleic acid encoding the tgRNA comprises a sequence comprising SEQ ID NO: 503. In some embodiments, the nucleic acid encoding the tgRNA comprises a sequence comprising SEQ ID NO: 504. In some embodiments, comprising a pair of tgRNAs, one of the tgRNAs comprises a sequence selected from any one of SEQ ID NOs: 500-504. In some embodiments, both of the sgRNAs in the tgRNA comprise a sequence selected from any one of SEQ ID NOs: 500-504 (i.e., they both comprise the same scaffold sequence). In some embodiments, the nucleotides 3′ of the guide sequence of both sgRNAs within the tgRNA are the same sequence. In some embodiments, the nucleotides 3′ of the guide sequence of both sgRNAs within the tgRNA are different sequences, but still use with the same class, type, subtype, and/or species of endonuclease.

[0170] In some embodiments, the nucleic acid encoding the tgRNA comprises a sequence comprising SEQ ID NO: 900. In some embodiments, the nucleic acid encoding the tgRNA comprises a sequence comprising SEQ ID NO: 601. In some embodiments, the nucleic acid encoding the tgRNA comprises a sequence comprising SEQ ID NO: 900. In some embodiments, the nucleic acid encoding the tgRNA comprises a sequence comprising SEQ ID NO: 901. In some embodiments, the nucleic acid encoding the tgRNA comprises a sequence comprising SEQ ID NO: 902. In some embodiments, the nucleic acid encoding the tgRNA comprises a sequence comprising SEQ ID NO: 903. In some embodiments, the nucleic acid encoding the tgRNA comprises a sequence comprising SEQ ID NO: 904. In some embodiments, the nucleic acid encoding the tgRNA comprises a sequence comprising SEQ ID NO: 905. In some embodiments, the nucleic acid encoding the tgRNA comprises a sequence comprising SEQ ID NO: 906. In some embodiments, the nucleic acid encoding the tgRNA comprises a sequence comprising SEQ ID NO: 907. In some embodiments, the nucleic acid encoding the tgRNA comprises a sequence comprising SEQ ID NO: 908. In some embodiments, the nucleic acid encoding the tgRNA comprises a sequence comprising SEQ ID NO: 909. In some embodiments, the nucleic acid encoding the tgRNA comprises a sequence comprising SEQ ID NO: 910. In some embodiments, the nucleic acid encoding the tgRNA comprises a sequence comprising SEQ ID NO: 911. In some embodiments, the nucleic acid encoding the tgRNA comprises a sequence comprising SEQ ID NO: 912. In some embodiments, the nucleic acid encoding the tgRNA comprises a sequence comprising SEQ ID NO: 913. In some embodiments, the nucleic acid encoding the tgRNA comprises a sequence comprising SEQ ID NO: 914. In some embodiments, the nucleic acid encoding the tgRNA comprises a sequence comprising SEQ ID NO: 915. In some embodiments, the nucleic acid encoding the tgRNA comprises a sequence comprising SEQ ID NO: 916. In some embodiments, the nucleic acid encoding the tgRNA comprises a sequence comprising SEQ ID NO: 917. In some embodiments, one of the sgRNAs within the tgRNA comprises a sequence selected from any one of SEQ ID NOs: 900 or 601, or 901-917, and the other comprises the same or different scaffold sequence, but even if a different sequence is used, the different scaffolds are capable of interacting with the same class, type, subtype, and/or species of endonuclease. In some embodiments, both of the sgRNAs within the tgRNA comprise a sequence selected from any one of SEQ ID NOs: 900 or 601, or 901-917. In some embodiments, the nucleotides 3′ of the guide sequence of the sgRNAs are the same sequence. In some embodiments, the nucleotides 3′ of the guide sequence of the sgRNAs are different sequences.

[0171] In some embodiments, the scaffold sequence(s) comprises one or more alterations in the stem loop 1 as compared to the stem loop 1 of a wildtype SluCas9 scaffold sequence (e.g., a scaffold comprising the sequence of SEQ ID NO: 900) or a reference SluCas9 scaffold sequence (e.g., a scaffold comprising the sequence of SEQ ID NO: 901). In some embodiments, the scaffold sequence comprises one or more alterations in the stem loop 2 as compared to the stem loop 2 of a wildtype SluCas9 scaffold sequence (e.g., a scaffold comprising the sequence of SEQ ID NO: 900) or a reference SluCas9 scaffold sequence (e.g., a scaffold comprising the sequence of SEQ ID NO: 901). In some embodiments, the scaffold sequence comprises one or more alterations in the tetraloop as compared to the tetraloop of a wildtype SluCas9 scaffold sequence (e.g., a scaffold comprising the sequence of SEQ ID NO: 900) or a reference SluCas9 scaffold sequence (e.g., a scaffold comprising the sequence of SEQ ID NO: 901). In some embodiments, the scaffold sequence comprises one or more alterations in the repeat region as compared to the repeat region of a wildtype SluCas9 scaffold sequence (e.g., a scaffold comprising the sequence of SEQ ID NO: 900) or a reference SluCas9 scaffold sequence (e.g., a scaffold comprising the sequence of SEQ ID NO: 901). In some embodiments, the scaffold sequence comprises one or more alterations in the anti-repeat region as compared to the anti-repeat region of a wildtype SluCas9 scaffold sequence (e.g., a scaffold comprising the sequence of SEQ ID NO: 900) or a reference SluCas9 scaffold sequence (e.g., a scaffold comprising the sequence of SEQ ID NO: 901). In some embodiments, the scaffold sequence comprises one or more alterations in the linker region as compared to the linker region of a wildtype SluCas9 scaffold sequence (e.g., a scaffold comprising the sequence of SEQ ID NO: 900) or a reference SluCas9 scaffold sequence (e.g., a scaffold comprising the sequence of SEQ ID NO: 901). See, e.g., Nishimasu et al., 2015, Cell, 162:1113-1126 for description of regions of a scaffold.

[0172] In some embodiments, an sgRNA comprises (5′ to 3′) at least a spacer sequence, a first complementary domain, a linking domain, a second complementary domain, and a proximal domain. A sgRNA or tracrRNA may further comprise a tail domain. The linking domain may be hairpin-forming. See, e.g., US 2017/0007679 for detailed discussion and examples of crRNA and gRNA domains, including second complementarity domains, linking domains, proximal domains, and tail domains.

[0173] The disclosure contemplates RNA equivalents of any of the DNA sequences provided herein (i.e., in which “T”s are replaced with “U”s), or DNA equivalents of any of the RNA sequences provided herein (i.e., in which “U”s are replaced with “T”s), as well as complements (including reverse complements) of any of the sequences disclosed herein.

### Delivery of Guide RNA Compositions

[0174] The nucleic acids and compositions disclosed herein may be delivered in vitro or in vivo using any suitable approach for delivering nucleic acids. Exemplary delivery approaches include lipid delivery vehicles, nanoparticles, vectors, and electroporation.

[0175] Lipid nanoparticles (LNPs) are a known means for delivery of nucleotide and protein cargo, and may be used for delivery of the tgRNAs, compositions, or pharmaceutical formulations disclosed herein. In some embodiments, the LNPs deliver nucleic acid, protein, or nucleic acid together with protein.

[0176] Electroporation is a well-known means for delivery of cargo, and any electroporation methodology may be used for delivering the tgRNAs disclosed herein.

[0177] In some embodiments, the tgRNAs are delivered in vivo for human therapeutic purposes.

[0178] In some embodiments, the tgRNAs are delivered ex vivo (in vitro) for therapeutic purposes.

[0179] In some embodiments, the tgRNAs are delivered ex vivo (in vitro) for non-therapeutic purposes, e.g., research purposes.

[0180] The nucleic acid encoding the tgRNA may be a vector.

[0181] Any type of vector, such as any of those described herein, may be used. In some embodiments, the vector is a viral vector. In some embodiments, the viral vector is a non-integrating viral vector (i.e., that does not insert sequence from the vector into a host chromosome). In some embodiments, the viral vector is an adeno-associated virus vector (AAV), a lentiviral vector, an integrase-deficient lentiviral vector, an adenoviral vector, a vaccinia viral vector, an alphaviral vector, or a herpes simplex viral vector. In some embodiments, the vector comprises a muscle-specific promoter. Exemplary muscle-specific promoters include a muscle creatine kinase promoter, a desmin promoter, an MHCK7 promoter, or an SPc5-12 promoter. See US 2004/0175727 A1; Wang et al., Expert Opin Drug Deliv. (2014) 11, 345-364; Wang et al., Gene Therapy (2008) 15, 1489-1499. In some embodiments, the muscle-specific promoter is a CK8 promoter. In some embodiments, the muscle-specific promoter is a CK8e promoter. In any of the foregoing embodiments, the vector may be an adeno-associated virus vector (AAV).

[0182] In some embodiments, the viral vector is an adeno-associated virus vector, a lentiviral vector, an integrase-deficient lentiviral vector, an adenoviral vector, a vaccinia viral vector, an alphaviral vector, or a herpes simplex viral vector. In some embodiments, the viral vector is an adeno-associated virus (AAV) vector. In some embodiments, the AAV vector is an AAV1, AAV2, AAV3, AAV4, AAV5, AAV6, AAV7, AAV8, AAVrh10 (see, e.g., SEQ ID NO: 81 of U.S. Pat. No. 9,790,472, which is incorporated by reference herein in its entirety), AAVrh74 (see, e.g., SEQ ID NO: 1 of US 2015/0111955, which is incorporated by reference herein in its entirety), or AAV9 vector, wherein the number following AAV indicates the AAV serotype. In some embodiments, the AAV vector is a single-stranded AAV (ssAAV). In some embodiments, the AAV vector is a double-stranded AAV (dsAAV). Any variant of an AAV vector or serotype thereof, such as a self-complementary AAV (scAAV) vector, is encompassed within the general terms AAV vector, AAV1 vector, etc. See, e.g., McCarty et al., Gene Ther. 2001; 8:1248-54, Naso et al., BioDrugs 2017; 31:317-334, and references cited therein for detailed discussion of various AAV vectors. In some embodiments, the AAV vector size is measured in length of nucleotides from ITR to ITR, inclusive of both ITRs. In some embodiments, the AAV vector is less than 5 kb in size from ITR to ITR, inclusive of both ITRs. In particular embodiments, the AAV vector is less than 4.9 kb from ITR to ITR in size, inclusive of both ITRs. In further embodiments, the AAV vector is less than 4.85 kb in size from ITR to ITR, inclusive of both ITRs. In further embodiments, the AAV vector is less than 4.8 kb in size from ITR to ITR, inclusive of both ITRs. In further embodiments, the AAV vector is less than 4.75 kb in size from ITR to ITR, inclusive of both ITRs. In further embodiments, the AAV vector is less than 4.7 kb in size from ITR to ITR, inclusive of both ITRs. In some embodiments, the vector is between 3.9-5 kb, 4-5 kb, 4.2-5 kb, 4.4-5 kb, 4.6-5 kb, 4.7-5 kb, 3.9-4.9 kb, 4.2-4.9 kb, 4.4-4.9 kb, 4.7-4.9 kb, 3.9-4.85 kb, 4.2-4.85 kb, 4.4-4.85 kb, 4.6-4.85 kb, 4.7-4.85 kb, 4.7-4.9 kb, 3.9-4.8 kb, 4.2-4.8 kb, 4.4-4.8 kb or 4.6-4.8 kb from ITR to ITR in size, inclusive of both ITRs. In some embodiments, the vector is between 4.4-4.85 kb in size from ITR to ITR, inclusive of both ITRs. In some embodiments, the vector is an AAV9 vector.

[0183] In some embodiments, the vector (e.g., viral vector, such as an adeno-associated viral vector) comprises a tissue-specific (e.g., muscle-specific) promoter, e.g., which is operatively linked to a sequence encoding the tgRNA and/or the endonuclease. In some embodiments, the muscle-specific promoter is a muscle creatine kinase promoter, a desmin promoter, an MHCK7 promoter, or an SPc5-12 promoter. In some embodiments, the muscle-specific promoter is a CK8 promoter. In some embodiments, the muscle-specific promoter is a CK8e promoter. Muscle-specific promoters are described in detail, e.g., in US2004/0175727 A1; Wang et al., Expert Opin Drug Deliv. (2014) 11, 345-364; Wang et al., Gene Therapy (2008) 15, 1489-1499. In some embodiments, the tissue-specific promoter is a neuron-specific promoter, such as an enolase promoter. See, e.g., Naso et al., BioDrugs 2017; 31:317-334; Dashkoff et al., Mol Ther Methods Clin Dev. 2016; 3:16081, and references cited therein for detailed discussion of tissue-specific promoters including neuron-specific promoters.

[0184] In some embodiments, in addition to tgRNA and Cas9 sequences, the vectors further comprise additional nucleic acids. Nucleic acids that do not encode guide RNA and Cas9 include, but are not limited to, promoters, enhancers, and regulatory sequences. In some embodiments, the vector comprises a muscle specific promoter, such as the CK8 promoter. The CK8 promoter has the following sequence (SEQ ID NO. 700):

| | |
|---|---|
| 1 | CTAGACTAGC ATGCTGCCCA TGTAAGGAGG CAAGGCCTGG GGACACCCGA GATGCCTGGT |
| 61 | TATAATTAAC CCAGACATGT GGCTGCCCCC CCCCCCCCAA CACCTGCTGC CTCTAAAAAT |
| 121 | AACCCTGCAT GCCATGTTCC CGGCGAAGGG CCAGCTGTCC CCCGCCAGCT AGACTCAGCA |
| 181 | CTTAGTTTAG GAACCAGTGA GCAAGTCAGC CCTTGGGGCA GCCCATACAA GGCCATGGGG |
| 241 | CTGGGCAAGC TGCACGCCTG GGTCCGGGGT GGGCACGGTG CCCGGGCAAC GAGCTGAAAG |
| 301 | CTCATCTGCT CTCAGGGGCC CCTCCCTGGG GACAGCCCCT CCTGGCTAGT CACACCCTGT |
| 361 | AGGCTCCTCT ATATAACCCA GGGGCACAGG GGCTGCCCTC ATTCTACCAC CACCTCCACA |
| 421 | GCACAGACAG ACACTCAGGA GCCAGCCAGC |

[0185] In some embodiments, the muscle-cell specific promoter is a variant of the CK8 promoter, called CK8e. In some embodiments, the size of the CK8e promoter is 436 bp. The CK8e promoter has the following sequence (SEQ ID NO. 701):

| | |
|---|---|
| 1 | TGCCCATGTA AGGAGGCAAG GCCTGGGGAC ACCCGAGATG CCTGGTTATA ATTAACCCAG |
| 61 | ACATGTGGCT GCCCCCCCCC CCCCAACACC TGCTGCCTCT AAAAATAACC CTGCATGCCA |
| 121 | TGTTCCCGGC GAAGGGCCAG CTGTCCCCCG CCAGCTAGAC TCAGCACTTA GTTTAGGAAC |
| 181 | CAGTGAGCAA GTCAGCCCTT GGGGCAGCCC ATACAAGGCC ATGGGGCTGG GCAAGCTGCA |
| 241 | CGCCTGGGTC CGGGGTGGGC ACGGTGCCCG GGCAACGAGC TGAAAGCTCA TCTGCTCTCA |
| 301 | GGGGCCCCTC CCTGGGGACA GCCCCTCCTG GCTAGTCACA CCCTGTAGGC TCCTCTATAT |
| 361 | AACCCAGGGG CACAGGGGCT GCCCTCATTC TACCACCACC TCCACAGCAC AGACAGACAC |
| 421 | TCAGGAGCCA GCCAGC |

[0186] In some embodiments, the Ck8e promoter comprises a nucleotide sequence that is at least 90%, 91%, 92%, 93%, 94%, 95%, 96%, 97%, 98%, 99% or 100% identical to the sequence of SEQ ID NO: 701.

[0187] In some embodiments, the vector comprises one or more promoters for expression of one or more tgRNAs. In some embodiments, the vector comprises a single promoter for expression of a tgRNA. In some embodiments, the vector comprises one or more of a U6, H1, or 7SK promoter. In some embodiments, the U6 promoter is the human U6 promoter (e.g., the U6L promoter or U6S promoter). In some embodiments, the promoter is the murine U6 promoter. In some embodiments, a nucleic acid encoding the U6 promoter does not comprise a guanine at the +1 position in the U6 transcriptional start site (i.e., does not comprise a guanine nucleotide (“+1G”) as the last nucleotide of the U6 promoter transcriptional start site). In some embodiments, a nucleic acid encoding the U6 promoter does comprise a guanine at the +1 position in the U6 transcriptional start site (i.e., does comprise a guanine nucleotide (“+1G”) as the last nucleotide of the U6 promoter transcriptional start site). In some embodiments, the 7SK promoter is a human 7SK promoter. In some embodiments, the 7SK promoter is the 7SK1 promoter. In some embodiments, the 7SK promoter is the 7SK2 promoter. In some embodiments, the H1 promoter is a human H1 promoter (e.g., the H1L promoter or the HIS promoter). In some embodiments, the vector comprises multiple guide sequences, wherein each guide sequence is under the control of a separate promoter.

[0188] In some embodiments, the U6 promoter comprises a nucleotide sequence that is at least 90%, 91%, 92%, 93%, 94%, 95%, 96%, 97%, 98%, 99% or 100% identical to the sequence of SEQ ID NO: 702:

| | |
|---|---|
| cgagtccaac acccgtggga atcccatggg caccatggcc cctcgctcca aaaatgcttt | 60 |
| cgcgtcgcgc agacactgct cggtagtttc ggggatcagc gtttgagtaa gagcccgcgt | 120 |
| ctgaaccctc cgcgccgccc cggccccagt ggaaagacgc gcaggcaaaa cgcaccacgt | 180 |
| gacggagcgt gaccgcgcgc cgagcgcgcg ccaaggtcgg gcaggaagag ggcctatttc | 240 |
| ccatgattcc ttcatatttg catatacgat acaaggctgt tagagagata attagaatta | 300 |
| atttgactgt aaacacaaag atattagtac aaaatacgtg acgtagaaag taataatttc | 360 |
| ttgggtagtt tgcagtttta aaattatgtt ttaaaatgga ctatcatatg cttaccgtaa | 420 |
| cttgaaagta tttcgatttc ttggctttat atatcttgtg gaaaggacga aa | 472 |

[0189] In some embodiments, the H1 promoter comprises a nucleotide sequence that is at least 90%, 91%, 92%, 93%, 94%, 95%, 96%, 97%, 98%, 99% or 100% identical to the sequence of SEQ ID NO: 703:

| | |
|---|---|
| gctcggcgcg cccatatttg catgtcgcta tgtgttctgg gaaatcacca taaacgtgaa | 60 |
| atgtctttgg atttgggaat cttataagtt ctgtatgaga ccacggta | 108 |

[0190] In some embodiments, the 7SK promoter comprises a nucleotide sequence that is at least 90%, 91%, 92%, 93%, 94%, 95%, 96%, 97%, 98%, 99% or 100% identical to the sequence of SEQ ID NO: 704:

| | |
|---|---|
| tgacggcgcg ccctgcagta tttagcatgc cccacccatc tgcaaggcat tctggatagt | 60 |
| gtcaaaacag ccggaaatca agtccgttta tctcaaactt tagcattttg ggaataaatg | 120 |
| atatttgcta tgctggttaa attagatttt agttaaattt cctgctgaag ctctagtacg | 180 |
| ataagtaact tgacctaagt gtaaagttga gatttccttc aggtttatat agcttgtgcg | 240 |
| ccgcctgggt a | 251 |

[0191] In some embodiments, the U6 promoter is a hU6c promoter and comprises a nucleotide sequence that is at least 90%, 91%, 92%, 93%, 94%, 95%, 96%, 97%, 98%, 99% or 100% identical to the sequence of SEQ ID NO: 705:

GAGGGCCTATTTCCCATGATTCCTTCATATTTGCATATACGATACAAGG
CTGTTAGAGAGATAATTGGAATTAATTTGACTGTAAACACAAAGATATT
AGTACAAAATACGTGACGTAGAAAGTAATAATTTCTTGGGTAGTTTGCA
GTTTTAAAATTATGTTTTAAAATGGACTATCATATGCTTACCGTAACTT
GAAAGTATTTCGATTTCTTGGCTTTATATATCTTGTGGAAAGGACGAAA
CACC.

[0192] In some embodiments, the U6 promoter is a variant of the hU6c promoter. In some embodiments, the variant of the hU6c promoter comprises alternative nucleotides as compared to the sequence of SEQ ID NO: 705. In some embodiments, the variant of the hU6c promoter comprises fewer nucleotides as compared to the 249 nucleotides of SEQ ID NO: 705. In some embodiments, the variant of the hU6c promoter has fewer nucleotides in the nucleosome binding sequence of the hU6c promoter of SEQ ID NO: 705. In some embodiments, the variant of the hU6c promoter lacks all of or at least a portion of (e.g., at least 5, 10, 15, 20, 25, or 30 nucleotides) the nucleotides corresponding to nucleotides 96-125 of SEQ ID NO: 705. In some embodiments, the variant of the hU6c promoter lacks all of or at least a portion of (e.g., at least 5, 10, 15, 20, 25, 30, 35, 40, 45, 50, 55, or 60 nucleotides) the nucleotides corresponding to nucleotides 81-140 of SEQ ID NO: 705. In some embodiments, the variant of the hU6c promoter lacks all of or at least a portion of (e.g., at least 10, 20, 30, 40, 50, 60, 65, 70, 75, 80, or 85 nucleotides) the nucleotides corresponding to nucleotides 66-150 of SEQ ID NO: 705. In some embodiments, the variant of the hU6c promoter lacks all of or at least a portion of (e.g., at least 10, 20, 30, 40, 50, 60, 70, 80, 90, 100, 110, or 120 nucleotides) the nucleotides corresponding to nucleotides 51-170 of SEQ ID NO: 705. In some embodiments, the variant of the hU6c promoter lacks the nucleotides corresponding to nucleotides 96-125 of SEQ ID NO: 705. In some embodiments, the variant of the hU6c promoter comprises 129-219 nucleotides. In some embodiments, the variant of the hU6c promoter comprises 219 nucleotides. In some embodiments, the variant of the hU6c promoter comprises 189 nucleotides. In some embodiments, the variant of the hU6c promoter comprises 159 nucleotides. In some embodiments, the variant of the hU6c promoter comprises 129 nucleotides.

[0193] In some embodiments, the U6 promoter is hU6d30 and comprises a nucleotide sequence that is at least 90%, 91%, 92%, 93%, 94%, 95%, 96%, 97%, 98%, 99% or 100% identical to the sequence of SEQ ID NO: 9001:

GAGGGCCTATTTCCCATGATTCCTTCATATTTGCATATACGATACAAGG
CTGTTAGAGAGATAATTGGAATTAATTTGACTGTAAACACAAAGATATA
ATTTCTTGGGTAGTTTGCAGTTTTAAAATTATGTTTTAAAATGGACTAT
CATATGCTTACCGTAACTTGAAAGTATTTCGATTTCTTGGCTTTATATA
TCTTGTGGAAAGGACGAAACACC.

[0194] In some embodiments, the U6 promoter is hU6d60 and comprises a nucleotide sequence that is at least 90%, 91%, 92%, 93%, 94%, 95%, 96%, 97%, 98%, 99% or 100% identical to the sequence of SEQ ID NO: 9002:

GAGGGCCTATTTCCCATGATTCCTTCATATTTGCATATACGATACAAGG
CTGTTAGAGAGATAATTGGAATTAATTTGACGTTTGCAGTTTTAAAATT
ATGTTTTAAAATGGACTATCATATGCTTACCGTAACTTGAAAGTATTTC
GATTTCTTGGCTTTATATATCTTGTGGAAAGGACGAAACACC.

[0195] In some embodiments, the U6 promoter is hU6d90 and comprises a nucleotide sequence that is at least 90%, 91%, 92%, 93%, 94%, 95%, 96%, 97%, 98%, 99% or 100% identical to the sequence of SEQ ID NO: 9003:

GAGGGCCTATTTCCCATGATTCCTTCATATTTGCATATACGATACAAGG
CTGTTAGAGAGATAATATTATGTTTTAAAATGGACTATCATATGCTTAC
CGTAACTTGAAAGTATTTCGATTTCTTGGCTTTATATATCTTGTGGAAA
GGACGAAACACC.

[0196] In some embodiments, the U6 promoter is hU6d120 and comprises a nucleotide sequence that is at least 90%, 91%, 92%, 93%, 94%, 95%, 96%, 97%, 98%, 99% or 100% identical to the sequence of SEQ ID NO: 9004:

GAGGGCCTATTTCCCATGATTCCTTCATATTTGCATATACGATACAAGG
CGGACTATCATATGCTTACCGTAACTTGAAAGTATTTCGATTTCTTGGC
TTTATATATCTTGTGGAAAGGACGAAACACC.

[0197] In some embodiments, the 7SK promoter is a 7SK2 promoter and comprises a nucleotide sequence that is at least 90%, 91%, 92%, 93%, 94%, 95%, 96%, 97%, 98%, 99% or 100% identical to the sequence of SEQ ID NO: 706:

CTGCAGTATTTAGCATGCCCCACCCATCTGCAAGGCATTCTGGATAGTG
TCAAAACAGCCGGAAATCAAGTCCGTTTATCTCAAACTTTAGCATTTTG
GGAATAAATGATATTTGCTATGCTGGTTAAATTAGATTTTAGTTAAATT
TCCTGCTGAAGCTCTAGTACGATAAGCAACTTGACCTAAGTGTAAAGTT
GAGACTTCCTTCAGGTTTATATAGCTTGTGCGCCGCTTGGGTACCTC.

[0198] In some embodiments, the 7SK promoter is a variant of the 7SK2 promoter. In some embodiments, the variant of the 7SK2 promoter comprises alternative nucleotides as compared to the sequence of SEQ ID NO: 706. In some embodiments, the variant of the 7SK2 promoter e.g., comprises fewer nucleotides as compared to the 243 nucleotides of SEQ ID NO: 706. In some embodiments, the variant of the 7SK2 promoter has fewer nucleotides in the nucleosome binding sequence of the 7SK2 promoter of SEQ ID NO: 706. In some embodiments, the variant of the 7SK2 promoter lacks all of or at least a portion of (e.g., at least 5, 10, 15, 20, 25, or 30 nucleotides) the nucleotides corresponding to nucleotides 95-124 of SEQ ID NO: 706. In some embodiments, the variant of the 7SK2 promoter lacks all of or at least a portion of (e.g., at least 5, 10, 15, 20, 25, 30, 35, 40, 45, 50, 55, or 60 nucleotides) the nucleotides corresponding to nucleotides 81-140 of SEQ ID NO: 706. In some embodiments, the variant of the 7SK2 promoter lacks all of or at least a portion of (e.g., at least 10, 20, 30, 40, 50, 60, 65, 70, 75, 80, 85 or 90 nucleotides) the nucleotides corresponding to nucleotides 67-156 of SEQ ID NO: 706. In some embodiments, the variant of the 7SK2 promoter lacks all of or at least a portion of (e.g., at least 10, 20, 30, 40, 50, 60, 70, 80, 90, 100, 110, or 120 nucleotides) the nucleotides corresponding to nucleotides 52-171 of SEQ ID NO: 706. In some embodiments, the variant of the 7SK2 promoter comprises 123-213 nucleotides. In some embodiments, the variant of the 7SK2 promoter comprises 213 nucleotides. In some embodiments, the variant of the 7SK2 promoter comprises 183 nucleotides. In some embodiments, the variant of the 7SK2 promoter comprises 153 nucleotides. In some embodiments, the variant of the 7SK2 promoter comprises 123 nucleotides.

[0199] In some embodiments, the 7SK promoter is 7SKd30 and comprises a nucleotide sequence that is at least 90%, 91%, 92%, 93%, 94%, 95%, 96%, 97%, 98%, 99% or 100% identical to the sequence of SEQ ID NO: 9006:

CTGCAGTATTTAGCATGCCCCACCCATCTGCAAGGCATTCTGGATAGTG
TCAAAACAGCCGGAAATCAAGTCCGTTTATCTCAAACTTTAGCATTTAA
ATTAGATTTTAGTTAAATTTCCTGCTGAAGCTCTAGTACGATAAGCAAC
TTGACCTAAGTGTAAAGTTGAGACTTCCTTCAGGTTTATATAGCTTGTG
CGCCGCTTGGGTACCTC.

[0200] In some embodiments, the 7SK promoter is 7SKd60 and comprises a nucleotide sequence that is at least 90%, 91%, 92%, 93%, 94%, 95%, 96%, 97%, 98%, 99% or 100% identical to the sequence of SEQ ID NO: 9007:

CTGCAGTATTTAGCATGCCCCACCCATCTGCAAGGCATTCTGGATAGTG
TCAAAACAGCCGGAAATCAAGTCCGTTTATCTTAAATTTCCTGCTGAAG
CTCTAGTACGATAAGCAACTTGACCTAAGTGTAAAGTTGAGACTTCCTT
CAGGTTTATATAGCTTGTGCGCCGCTTGGGTACCTC.

[0201] In some embodiments, the 7SK promoter is 7SKd90 and comprises a nucleotide sequence that is at least 90%, 91%, 92%, 93%, 94%, 95%, 96%, 97%, 98%, 99% or 100% identical to the sequence of SEQ ID NO: 9008:

CTGCAGTATTTAGCATGCCCCACCCATCTGCAAGGCATTCTGGATAGTG
TCAAAACAGCCGGAAATAGCTCTAGTACGATAAGCAACTTGACCTAAGT
GTAAAGTTGAGACTTCCTTCAGGTTTATATAGCTTGTGCGCCGCTTGGG
TACCTC.

[0202] In some embodiments, the 7SK promoter is 7SKd120 and comprises a nucleotide sequence that is at least 90%, 91%, 92%, 93%, 94%, 95%, 96%, 97%, 98%, 99% or 100% identical to the sequence of SEQ ID NO: 9009:

CTGCAGTATTTAGCATGCCCCACCCATCTGCAAGGCATTCTGGATAGTG
TCAGCAACTTGACCTAAGTGTAAAGTTGAGACTTCCTTCAGGTTTATAT
AGCTTGTGCGCCGCTTGGGTACCTC.

In some embodiments, the H1 promoter is a H1m or mH1 promoter and comprises a nucleotide sequence that is at least 90%, 91%, 92%, 93%, 94%, 95%, 96%, 97%, 98%, 99% or 100% identical to the sequence of SEQ ID NO: 707:

AATATTTGCATGTCGCTATGTGTTCTGGGAAATCACCATAAACGTGAAA
TGTCTTTGGATTTGGGAATCTTATAAGTTCTGTATGAGACCACTCTTTC
CC.

[0203] In some embodiments, the promoter is an M11 promoter and comprises a nucleotide sequence that is at least 90%, 91%, 92%, 93%, 94%, 95%, 96%, 97%, 98%, 99% or 100% identical to the sequence of SEQ ID NO: 708:

ATATTTAGCATGTCGCTATGTGTTCTGGGAAACTTGACCTAAGTGTAAA
GTTGAGATTTCCTTCAGGTTTATATAGTTCTGTATGAGACCACTCTTTC
CC.

[0204] In some embodiments, the vector comprises multiple inverted terminal repeats (ITRs). These ITRs may be of an AAV1, AAV2, AAV3, AAV4, AAV5, AAV6, AAV7, AAV8, or AAV9 serotype. In some embodiments, the ITRs are of an AAV2 serotype. In some embodiments, the 5′ ITR comprises a sequence that is at least 80%, 85%, 90%, 91%, 92%, 93%, 94%, 95%, 96%, 97%, 98%, 99%, or 100% identical to the sequence of SEQ ID NO: 709:

GGCCACTCCCTCTCTGCGCGCTCGCTCGCTCACTGAGGCCGGGCGACCA
AAGGTCGCCCGACGCCCGGGCTTTGCCCGGGCGGCCTCAGTGAGCGAGC
GAGCGCGCAGAGAGGGAGTGGCCAACTCCATCACTAGGGGTTCCT.

[0205] In some embodiments, the 3′ITR comprises a sequence that is at least 80%, 85%, 90%, 91%, 92%, 93%, 94%, 95%, 96%, 97%, 98%, 99%, or 100% identical to the sequence of SEQ ID NO: 710:

AGGAACCCCTAGTGATGGAGTTGGCCACTCCCTCTCTGCGCGCTCGCTC
GCTCACTGAGGCCGGGCGACCAAAGGTCGCCCGACGCCCGGGCTTTGCC
CGGGCGGCCTCAGTGAGCGAGCGAGCGCGCAGAGAGGGA.

[0206] In some embodiments, the vector comprises a nucleic acid encoding a Cas9 protein (e.g., an SaCas9 or SluCas9 protein). In some embodiments, the nucleic acid encoding the Cas9 protein is under the control of a CK8e promoter. In some embodiments, the nucleic acid encoding the guide RNA sequence is under the control of a hU6c promoter. In some embodiments, the vector is AAV9.

[0207] In some embodiments, encompassed is a nucleic acid comprising a first sgRNA connected to a second sgRNA via a linker, wherein the sgRNAs are for use with the same class, type, subtype, and/or species of endonuclease, or a composition comprising the nucleic acid and optionally further comprising an endonuclease or a nucleic acid encoding an endonuclease. In some embodiments, this nucleic acid further comprises a promoter for expression of both the first gRNA and a second gRNA. In some embodiments, the nucleic acid comprises, in order, a promoter, a first gRNA, a first gRNA scaffold, a linker, a second gRNA, and a second gRNA scaffold.

[0208] In some embodiments, the nucleic acid comprises, in order, a promoter, the reverse complement of a first gRNA scaffold, the reverse complement of a first gRNA scaffold, a linker, a second gRNA, and a second gRNA scaffold.

[0209] In some embodiments, the nucleic acid comprises, in order, a promoter, first gRNA and a second gRNA, a first gRNA, a first gRNA scaffold, a linker, the reverse complement of a second gRNA scaffold, and the reverse complement of a second gRNA scaffold.

[0210] In some embodiments, the nucleic acid comprises, in order, a promoter, a first gRNA, a first gRNA scaffold, a linker, a second gRNA, a second gRNA scaffold.

[0211] In some embodiments, the nucleic acid comprises, in order, a promoter, the reverse complement of a first gRNA scaffold, the reverse complement of a first gRNA scaffold, a linker, a second gRNA, and a second gRNA scaffold.

[0212] In some embodiments, the nucleic acid comprises, in order, a promoter, a first gRNA, a first gRNA scaffold, a linker, the reverse complement of a second gRNA scaffold, and the reverse complement of a second gRNA scaffold.

[0213] In some embodiments, the nucleic acid comprises, in order, a promoter, a first gRNA, a first gRNA scaffold, a linker, a second gRNA, a second gRNA scaffold, a promoter for expression of an endonuclease, and a gene encoding an endonuclease.

[0214] In some embodiments, the nucleic acid comprises, in order, a promoter, the reverse complement of a first gRNA scaffold, the reverse complement of a first gRNA scaffold, a linker, a second gRNA, and a second gRNA scaffold, a promoter for expression of an endonuclease, and a gene encoding an endonuclease.

[0215] In some embodiments, the nucleic acid comprises, in order, a promoter, a first gRNA, a first gRNA scaffold, a linker, the reverse complement of a second gRNA scaffold, and the reverse complement of a second gRNA scaffold, a promoter for expression of an endonuclease, and a gene encoding an endonuclease.

[0216] In some embodiments, the nucleic acid comprises, in order, a promoter, the reverse complement of a first gRNA scaffold, the reverse complement of a first gRNA scaffold, a linker, a second gRNA, and a second gRNA scaffold.

[0217] In some embodiments, the nucleic acid comprises, in order, a promoter, a first gRNA, a first gRNA scaffold, a linker, the reverse complement of a second gRNA scaffold, and the reverse complement of a second gRNA scaffold.

[0218] In some embodiments, the nucleic acid comprises, in order, a first gRNA, a first gRNA scaffold, a linker, a second gRNA, a second gRNA scaffold, the reverse complement of a gene encoding an endonuclease, and the reverse complement of a promoter of a gene encoding an endonuclease.

[0219] In some embodiments, the nucleic acid comprises, in order, the reverse complement of a first gRNA scaffold, the reverse complement of a first gRNA scaffold, a linker, a second gRNA, and a second gRNA scaffold, the reverse complement of a gene encoding an endonuclease, and the reverse complement of a promoter of a gene encoding an endonuclease.

[0220] In some embodiments, the nucleic acid comprises, in order, a first gRNA, a first gRNA scaffold, a linker, the reverse complement of a second gRNA scaffold, and the reverse complement of a second gRNA scaffold, and the reverse complement of a gene encoding an endonuclease, the reverse complement of a promoter of a gene encoding an endonuclease.

### Ribonucleoprotein Complex

[0221] In some embodiments, a composition is encompassed comprising: a tgRNA and one or more endonucleases, such as a Cas9 endonuclease, including any of the mutant Cas9 proteins disclosed herein. In some embodiments, the tgRNA together with a Cas9 is called a ribonucleoprotein complex (RNP).

[0222] In some embodiments, a single tgRNA may be associated with multiple endonucleases (e.g., multiple Cas9 proteins), thereby forming multiple RNPs. In some embodiments, a first RNP comprising an endonuclease (e.g., a Cas9 protein) and the first sgRNA in a tgRNA binds to a first target genomic sequence at the same time as a second RNP comprising an endonuclease (e.g., another Cas9 protein) and the second sgRNA in a tgRNA binds to a second target genomic sequence. In some embodiments, a first RNP comprising an endonuclease (e.g., a Cas9 protein) and the first sgRNA in a tgRNA cuts at a first target genomic sequence at the same time as a second RNP comprising an endonuclease (e.g., another Cas9 protein) and the second sgRNA in a tgRNA cuts at a second target genomic sequence. In some embodiments, a first RNP comprising an endonuclease (e.g., a Cas9 protein) and the first sgRNA in a tgRNA binds to a target genomic sequence at the same time as a second RNP comprising an endonuclease (e.g., another Cas9 protein) and the second sgRNA in a tgRNA binds to a target sequence in a separate polynucleotide (e.g., a polynucleotide comprising a donor template). In some embodiments, a first RNP comprising an endonuclease (e.g., a Cas9 protein) and the first sgRNA in a tgRNA cuts at a target genomic sequence at the same time as a second RNP comprising an endonuclease (e.g., another Cas9 protein) and the second sgRNA in a tgRNA cuts at a target sequence in a separate polynucleotide (e.g., a polynucleotide comprising a donor template). In some embodiments, a second RNP comprising an endonuclease (e.g., a Cas9 protein) and the second sgRNA in a tgRNA binds to a target genomic sequence at the same time as a first RNP comprising an endonuclease (e.g., another Cas9 protein) and the first sgRNA in a tgRNA binds to a target sequence in a separate polynucleotide (e.g., a polynucleotide comprising a donor template). In some embodiments, a second RNP comprising an endonuclease (e.g., a Cas9 protein) and the second sgRNA in a tgRNA cuts at a target genomic sequence at the same time as a first RNP comprising an endonuclease (e.g., another Cas9 protein) and the first sgRNA in a tgRNA cuts at a target sequence in a separate polynucleotide (e.g., a polynucleotide comprising a donor template).

[0223] In some embodiments, the disclosure provides for an RNP complex, wherein each guide RNA (e.g., the first sgRNA and second sgRNA in a tgRNA) binds to or is capable of binding to a target sequence in the dystrophin gene.

[0224] In some embodiments, chimeric Cas9 (SaCas9 or SluCas9) nucleases are used, where one domain or region of the protein is replaced by a portion of a different protein. In some embodiments, a Cas9 nuclease domain may be replaced with a domain from a different nuclease such as Fok1. In some embodiments, a Cas9 nuclease may be a modified nuclease.

[0225] In some embodiments, the Cas9 is modified to contain only one functional nuclease domain. For example, the agent protein may be modified such that one of the nuclease domains is mutated or fully or partially deleted to reduce its nucleic acid cleavage activity.

[0226] In some embodiments, a conserved amino acid within a Cas9 protein nuclease domain is substituted to reduce or alter nuclease activity. In some embodiments, a Cas9 nuclease may comprise an amino acid substitution in the RuvC or RuvC-like nuclease domain. Exemplary amino acid substitutions in the RuvC or RuvC-like nuclease domain include D10A (based on the S. pyogenes Cas9 protein). See, e.g., Zetsche et al. (2015) Cell October 22:163(3): 759-771. In some embodiments, the Cas9 nuclease may comprise an amino acid substitution in the HNH or HNH-like nuclease domain. Exemplary amino acid substitutions in the HNH or HNH-like nuclease domain include E762A, H840A, N863A, H983A, and D986A (based on the S. pyogenes Cas9 protein, see SEQ ID NO: 730). See, e.g., Zetsche et al. (2015). Further exemplary amino acid substitutions include D917A, E1006A, and D1255A (based on the Francisella novicida U112 Cpf1 (FnCpf1) sequence (UniProtKB-AOQ7Q2 (CPF1 FRATN)). Further exemplary amino acid substitutions include D10A and N580A (based on the S. aureus Cas9 protein). See, e.g., Friedland et al., 2015, Genome Biol., 16:257.

[0227] In some embodiments, the Cas9 lacks cleavase activity. In some embodiments, the Cas9 comprises a dCas DNA-binding polypeptide. A dCas polypeptide has DNA-binding activity while essentially lacking catalytic (cleavase/nickase) activity. In some embodiments, the dCas polypeptide is a dCas9 polypeptide. In some embodiments, the Cas9 lacking cleavase activity or the dCas DNA-binding polypeptide is a version of a Cas nuclease (e.g., a Cas9 nuclease discussed above) in which its endonucleolytic active sites are inactivated, e.g., by one or more alterations (e.g., point mutations) in its catalytic domains. See, e.g., US 2014/0186958 A1; US 2015/0166980 A1.

[0228] In some embodiments, the Cas9 comprises one or more heterologous functional domains (e.g., is or comprises a fusion polypeptide).

[0229] In some embodiments, the heterologous functional domain may facilitate transport of the Cas9 into the nucleus of a cell. For example, the heterologous functional domain may be a nuclear localization signal (NLS). In some embodiments, the Cas9 may be fused with 1-10 NLS(s). In some embodiments, the Cas9 may be fused with 1-5 NLS(s). In some embodiments, the Cas9 may be fused with 1-3 NLS(s). In some embodiments, the Cas9 may be fused with one NLS. Where one NLS is used, the NLS may be attached at the N-terminus or the C-terminus of the Cas9 sequence, and may be directly fused/attached. In some embodiments, where more than one NLS is used, one or more NLS may be attached at the N-terminus and/or one or more NLS may be attached at the C-terminus. In some embodiments, one or more NLSs are directly attached to the Cas9. In some embodiments, one or more NLSs are attached to the Cas9 by means of a linker. In some embodiments, the linker is between 3-25 amino acids in length. In some embodiments, the linker is between 3-6 amino acids in length. In some embodiments, the linker comprises glycine and serine. In some embodiments, the linker comprises the sequence of GSVD (SEQ ID NO: 550) or GSGS (SEQ ID NO: 551). It may also be inserted within the Cas9 sequence. In other embodiments, the Cas9 may be fused with more than one NLS. In some embodiments, the Cas9 may be fused with 2, 3, 4, or 5 NLSs. In some embodiments, the Cas9 may be fused with two NLSs. In certain circumstances, the two NLSs may be the same (e.g., two SV40 NLSs) or different. In some embodiments, the Cas9 protein is fused with one or more SV40 NLSs. In some embodiments, the SV40 NLS comprises the amino acid sequence of SEQ ID NO: 713 (PKKKRKV). In some embodiments, the Cas9 protein (e.g., the SaCas9 or SluCas9 protein) is fused to one or more nucleoplasmin NLSs. In some embodiments, the Cas protein is fused to one or more c-myc NLSs. In some embodiments, the Cas protein is fused to one or more ElA NLSs. In some embodiments, the Cas protein is fused to one or more BP (bipartite) NLSs. In some embodiments, the nucleoplasmin NLS comprises the amino acid sequence of SEQ ID NO: 714 (KRPAATKKAGQAKKKK). In some embodiments, the Cas9 protein is fused with a c-Myc NLS. In some embodiments, the c-Myc NLS is SEQ ID NO: 942 (PAAKKKKLD). In some embodiments, the c-Myc NLS is encoded by the nucleic acid sequence of SEQ ID NO: 722 (CCGGCAGCTAAGAAAAAGAAACTGGAT). In some embodiments, the Cas9 is fused to two SV40 NLS sequences linked at the carboxy terminus. In some embodiments, the Cas9 may be fused with two NLSs, one linked at the N-terminus and one at the C-terminus. In some embodiments, the Cas9 may be fused with 3 NLSs. In some embodiments, the Cas9 may be fused with 3 NLSs, two linked at the N-terminus and one linked at the C-terminus. In some embodiments, the Cas9 may be fused with 3 NLSs, one linked at the N-terminus and two linked at the C-terminus. In some embodiments, the Cas9 may be fused with no NLS. In some embodiments, the Cas9 may be fused with one NLS. In some embodiments, the Cas9 may be fused with an NLS on the C-terminus and does not comprise an NLS fused on the N-terminus. In some embodiments, the Cas9 may be fused with an NLS on the N-terminus and does not comprise an NLS fused on the C-terminus. In some embodiments, the Cas9 protein is fused to an SV40 NLS and to a nucleoplasmin NLS. In some embodiments, the Cas9 protein is fused to an SV40 NLS and to a c-Myc NLS. In some embodiments, the SV40 NLS is fused to the C-terminus of the Cas9, while the nucleoplasmin NLS is fused to the N-terminus of the Cas9 protein. In some embodiments, the SV40 NLS is fused to the C-terminus of the Cas9, while the c-Myc NLS is fused to the N-terminus of the Cas9 protein. In some embodiments, the SV40 NLS is fused to the N-terminus of the Cas9, while the nucleoplasmin NLS is fused to the C-terminus of the Cas9 protein. In some embodiments, the SV40 NLS is fused to the N-terminus of the Cas9, while the c-Myc NLS is fused to the C-terminus of the Cas9 protein. In some embodiments, the SV40 NLS is fused to the Cas9 protein by means of a linker. In some embodiments, the SV40 NLS and linker is encoded by the nucleic acid sequence of SEQ ID NO: 723 (ATGATGGCCCCAAAGAAGAAGCGGAAGGTCGGTATCCACGGAGTCCCAGCAGCC). In some embodiments, the nucleoplasmin NLS is fused to the Cas9 protein by means of a linker. In some embodiments, the c-Myc NLS is fused to the Cas9 protein by means of a linker. In some embodiments, an additional domain may be: a) fused to the N- or C-terminus of the Cas protein (e.g., a Cas9 protein), b) fused to the N-terminus of an NLS fused to the N-terminus of a Cas protein, or c) fused to the C-terminus of an NLS fused to the C-terminus of a Cas protein. In some embodiments, an NLS is fused to the N- and/or C-terminus of the Cas protein by means of a linker. In some embodiments, an NLS is fused to the N-terminus of an N-terminally-fused NLS on a Cas protein by means of a linker, and/or an NLS is fused to the C-terminus of a C-terminally fused NLS on a Cas protein by means of a linker. In some embodiments, the linker is between 3-15, 3-12, 3-10, 3-8, 3-5 amino acids in length. In some embodiments, the linker comprises glycine. In some embodiments, the linker comprises serine. In some embodiments, the linker is GSVD (SEQ ID NO: 550) or GSGS (SEQ ID NO: 551). In some embodiments, the Cas protein comprises a c-Myc NLS fused to the N-terminus of the Cas protein (or to an N-terminally-fused NLS on the Cas protein), optionally by means of a linker. In some embodiments, the Cas protein comprises an SV40 NLS fused to the C-terminus of the Cas protein (or to a C-terminally-fused NLS on the Cas protein), optionally by means of a linker. In some embodiments, the Cas protein comprises a nucleoplasmin NLS fused to the C-terminus of the Cas protein (or to a C-terminally-fused NLS on the Cas protein), optionally by means of a linker. In some embodiments, the Cas protein comprises: a) a c-Myc NLS fused to the N-terminus of the Cas protein, optionally by means of a linker, b) an SV40 NLS fused to the C-terminus of the Cas protein, optionally by means of a linker, and c) a nucleoplasmin NLS fused to the C-terminus of the SV40 NLS, optionally by means of a linker. In some embodiments, the Cas protein comprises: a) a c-Myc NLS fused to the N-terminus of the Cas protein, optionally by means of a linker, b) a nucleoplasmin NLS fused to the C-terminus of the Cas protein, optionally by means of a linker, and c) an SV40 NLS fused to the C-terminus of the nucleoplasmin NLS, optionally by means of a linker. In some embodiments, a c-myc NLS is fused to the N-terminus of the Cas9 and an SV40 NLS and/or nucleoplasmin NLS is fused to the C-terminus of the Cas9. In some embodiments, a c-myc NLS is fused to the N-terminus of the Cas9 (e.g., by means of a linker such as GSVD), an SV40 NLS is fused to the C-terminus of the Cas9 (e.g., by means of a linker such as GSGS), and a nucleoplasmin NLS is fused to the C-terminus of the SV-40 NLS (e.g., by means of a linker such as GSGS).

[0230] In some embodiments, the heterologous functional domain may be capable of modifying the intracellular half-life of the Cas9. In some embodiments, the half-life of the Cas9 may be increased. In some embodiments, the half-life of the Cas9 may be reduced. In some embodiments, the heterologous functional domain may be capable of increasing the stability of the Cas9. In some embodiments, the heterologous functional domain may be capable of reducing the stability of the Cas9. In some embodiments, the heterologous functional domain may act as a signal peptide for protein degradation. In some embodiments, the protein degradation may be mediated by proteolytic enzymes, such as, for example, proteasomes, lysosomal proteases, or calpain proteases. In some embodiments, the heterologous functional domain may comprise a PEST sequence. In some embodiments, the Cas9 may be modified by addition of ubiquitin or a polyubiquitin chain. In some embodiments, the ubiquitin may be a ubiquitin-like protein (UBL). Non-limiting examples of ubiquitin-like proteins include small ubiquitin-like modifier (SUMO), ubiquitin cross-reactive protein (UCRP, also known as interferon-stimulated gene-15 (ISG15)), ubiquitin-related modifier-1 (URM1), neuronal-precursor-cell-expressed developmentally downregulated protein-8 (NEDD8, also called Rubl in S. cerevisiae), human leukocyte antigen F-associated (FAT10), autophagy-8 (ATG8) and -12 (ATG12), Fau ubiquitin-like protein (FUB1), membrane-anchored UBL (MUB), ubiquitin fold-modifier-1 (UFM1), and ubiquitin-like protein-5 (UBL5).

[0231] In some embodiments, the heterologous functional domain may be a marker domain. Non-limiting examples of marker domains include fluorescent proteins, purification tags, epitope tags, and reporter gene sequences. In some embodiments, the marker domain may be a fluorescent protein. Non-limiting examples of suitable fluorescent proteins include green fluorescent proteins (e.g., GFP, GFP-2, tagGFP, turboGFP, sfGFP, EGFP, Emerald, Azami Green, Monomeric Azami Green, CopGFP, AceGFP, ZsGreen1), yellow fluorescent proteins (e.g., YFP, EYFP, Citrine, Venus, YPet, PhiYFP, ZsYellow1), blue fluorescent proteins (e.g., EBFP, EBFP2, Azurite, mKalamal, GFPuv, Sapphire, T-sapphire), cyan fluorescent proteins (e.g., ECFP, Cerulean, CyPet, AmCyan1, Midoriishi-Cyan), red fluorescent proteins (e.g., mKate, mKate2, mPlum, DsRed monomer, mCherry, mRFP1, DsRed-Express, DsRed2, DsRed-Monomer, HcRed-Tandem, HcRed1, AsRed2, eqFP611, mRasberry, mStrawberry, Jred), and orange fluorescent proteins (mOrange, mKO, Kusabira-Orange, Monomeric Kusabira-Orange, mTangerine, tdTomato) or any other suitable fluorescent protein. In other embodiments, the marker domain may be a purification tag and/or an epitope tag. Non-limiting exemplary tags include glutathione-S-transferase (GST), chitin binding protein (CBP), maltose binding protein (MBP), thioredoxin (TRX), poly(NANP), tandem affinity purification (TAP) tag, myc, AcV5, AU1, AU5, E, ECS, E2, FLAG, HA, nus, Softag 1, Softag 3, Strep, SBP, Glu-Glu, HSV, KT3, S, S1, T7, V5, VSV-G, 6×His, 8×His, biotin carboxyl carrier protein (BCCP), poly-His, and calmodulin. Non-limiting exemplary reporter genes include glutathione-S-transferase (GST), horseradish peroxidase (HRP), chloramphenicol acetyltransferase (CAT), beta-galactosidase, beta-glucuronidase, luciferase, or fluorescent proteins.

[0232] In additional embodiments, the heterologous functional domain may target the Cas9 to a specific organelle, cell type, tissue, or organ. In some embodiments, the heterologous functional domain may target the Cas9 to muscle.

[0233] In further embodiments, the heterologous functional domain may be an effector domain. When the Cas9 is directed to its target sequence, e.g., when a Cas9 is directed to a target sequence by a guide RNA, the effector domain may modify or affect the target sequence. In some embodiments, the effector domain may be chosen from a nucleic acid binding domain or a nuclease domain (e.g., a non-Cas nuclease domain). In some embodiments, the heterologous functional domain is a nuclease, such as a FokI nuclease. See, e.g., U.S. Pat. No. 9,023,649.

[0234] In some embodiments, any of the compositions disclosed herein comprising any of the guides and/or endonucleases disclosed herein is sterile and/or substantially pyrogen-free. In particular embodiments, any of the compositions disclosed herein comprise a pharmaceutically acceptable carrier. The phrase “pharmaceutically or pharmacologically acceptable” refers to molecular entities and compositions that do not produce an adverse, allergic, or other untoward reaction when administered to an animal or human. As used herein “pharmaceutically acceptable carrier” includes any and all solvents (e.g., water), dispersion media, coatings, antibacterial and antifungal agents, isotonic and absorption delaying agents, and the like that are physiologically compatible, including pharmaceutically acceptable cell culture media. Pharmaceutically acceptable carriers include sterile aqueous solutions or dispersions and sterile powders for the extemporaneous preparation of sterile injectable solutions or dispersion. In some embodiments, the composition comprises a preservative to prevent the growth of microorganisms.

### Endonucleases

[0235] In some embodiments, any of the nucleic acids disclosed herein encodes an RNA-targeted endonuclease. In some embodiments, the RNA-targeted endonuclease has cleavase activity, which can also be referred to as double-strand endonuclease activity. In some embodiments, the RNA-targeted endonuclease comprises a Cas nuclease. Examples of Cas9 nucleases include those of the type II CRISPR systems.

[0236] In some embodiments, the Cas protein comprises an amino acid sequence that is at least 80%, 85%, 90%, 91%, 92%, 93%, 94%, 95%, 96%, 97%, 98%, 99% or 100% identical to the sequence of SEQ ID NO: 730 (designated herein as SpCas9):

[sequence omitted]

In some embodiments, the nucleic acid encoding SaCas9 encodes an SaCas9 comprising an amino acid sequence that is at least 80%, 85%, 90%, 91%, 92%, 93%, 94%, 95%, 96%, 97%, 98%, 99% or 100% identical to the sequence of SEQ ID NO: 711:

KRNYILGLDIGITSVGYGIIDYETRDVIDAGVRLFKEANVENNEGRRSKRGARRLKRRRRHRI
QRVKKLLFDYNLLTDHSELSGINPYEARVKGLSQKLSEEEFSAALLHLAKRRGVHNVNEVEE
DTGNELSTKEQISRNSKALEEKYVAELQLERLKKDGEVRGSINRFKTSDYVKEAKQLLKVQK
AYHQLDQSFIDTYIDLLETRRTYYEGPGEGSPFGWKDIKEWYEMLMGHCTYFPEELRSVKYA
YNADLYNALNDLNNLVITRDENEKLEYYEKFQIIENVFKQKKKPTLKQIAKEILVNEEDIKGY
RVTSTGKPEFTNLKVYHDIKDITARKEIIENAELLDQIAKILTIYQSSEDIQEELTNLNSELTQEE
IEQISNLKGYTGTHNLSLKAINLILDELWHTNDNQIAIFNRLKLVPKKVDLSQQKEIPTTLVDD
FILSPVVKRSFIQSIKVINAIIKKYGLPNDIIIELAREKNSKDAQKMINEMQKRNRQTNERIEEIIR
TTGKENAKYLIEKIKLHDMQEGKCLYSLEAIPLEDLLNNPFNYEVDHIIPRSVSFDNSFNNKVL
VKQEENSKKGNRTPFQYLSSSDSKISYETFKKHILNLAKGKGRISKTKKEYLLEERDINRFSVQ
KDFINRNLVDTRYATRGLMNLLRSYFRVNNLDVKVKSINGGFTSFLRRKWKFKKERNKGYK
HHAEDALIIANADFIFKEWKKLDKAKKVMENQMFEEKQAESMPEIETEQEYKEIFITPHQIKHI
KDFKDYKYSHRVDKKPNRELINDTLYSTRKDDKGNTLIVNNLNGLYDKDNDKLKKLINKSP
EKLLMYHHDPQTYQKLKLIMEQYGDEKNPLYKYYEETGNYLTKYSKKDNGPVIKKIKYYGN
KLNAHLDITDDYPNSRNKVVKLSLKPYRFDVYLDNGVYKFVTVKNLDVIKKENYYEVNSKC
YEEAKKLKKISNQAEFIASFYNNDLIKINGELYRVIGVNNDLLNRIEVNMIDITYREYLENMN
DKRPPRIIKTIASKTQSIKKYSTDILGNLYEVKSKKHPQIIKKG.

[0237] In some embodiments, the nucleic acid encoding SaCas9 comprises the nucleic acid of SEQ ID NO: 9014:

AAGCGCAATTACATCCTGGGCCTGGATATCGGCATCACCTCCGTGGGCTACG
GCATCATCGACTATGAGACACGGGATGTGATCGACGCCGGCGTGAGACTGTTCAAGGAG
GCCAACGTGGAGAACAATGAGGGCCGGCGGAGCAAGAGGGGAGCAAGGCGCCTGAAGC
GGAGAAGGCGCCACAGAATCCAGAGAGTGAAGAAGCTGCTGTTCGATTACAACCTGCTG
ACCGACCACTCCGAGCTGTCTGGCATCAATCCTTATGAGGCCCGGGTGAAGGGCCTGTCC
CAGAAGCTGTCTGAGGAGGAGTTTTCTGCCGCCCTGCTGCACCTGGCAAAGAGGAGAGG
CGTGCACAACGTGAATGAGGTGGAGGAGGACACCGGCAACGAGCTGAGCACAAAGGAG
CAGATCAGCCGCAATTCCAAGGCCCTGGAGGAGAAGTATGTGGCCGAGCTGCAGCTGGA
GCGGCTGAAGAAGGATGGCGAGGTGAGGGGCTCCATCAATCGCTTCAAGACCTCTGACT
ACGTGAAGGAGGCCAAGCAGCTGCTGAAGGTGCAGAAGGCCTACCACCAGCTGGATCAG
AGCTTTATCGATACATATATCGACCTGCTGGAGACCAGGCGCACATACTATGAGGGACC
AGGAGAGGGCTCCCCCTTCGGCTGGAAGGACATCAAGGAGTGGTACGAGATGCTGATGG
GCCACTGCACCTATTTTCCAGAGGAGCTGAGATCCGTGAAGTACGCCTATAACGCCGATC
TGTACAACGCCCTGAATGACCTGAACAACCTGGTCATCACCAGGGATGAGAACGAGAAG
CTGGAGTACTATGAGAAGTTCCAGATCATCGAGAACGTGTTCAAGCAGAAGAAGAAGCC
TACACTGAAGCAGATCGCCAAGGAGATCCTGGTGAACGAGGAGGACATCAAGGGCTACC
GCGTGACCAGCACAGGCAAGCCAGAGTTCACCAATCTGAAGGTGTATCACGATATCAAG
GACATCACAGCCCGGAAGGAGATCATCGAGAACGCCGAGCTGCTGGATCAGATCGCCAA
GATCCTGACCATCTATCAGAGCTCCGAGGACATCCAGGAGGAGCTGACCAACCTGAATA
GCGAGCTGACACAGGAGGAGATCGAGCAGATCAGCAATCTGAAGGGCTACACCGGCAC
ACACAACCTGTCCCTGAAGGCCATCAATCTGATCCTGGATGAGCTGTGGCACACAAACG
ACAATCAGATCGCCATCTTTAACAGGCTGAAGCTGGTGCCAAAGAAGGTGGACCTGAGC
CAGCAGAAGGAGATCCCAACCACACTGGTGGACGATTTCATCCTGTCCCCCGTGGTGAA
GCGGAGCTTCATCCAGAGCATCAAAGTGATCAACGCCATCATCAAGAAGTACGGCCTGC
CCAATGATATCATCATCGAGCTGGCCAGGGAGAAGAACTCTAAGGACGCCCAGAAGATG
ATCAATGAGATGCAGAAGAGGAACCGCCAGACCAATGAGCGGATCGAGGAGATCATCA
GAACCACAGGCAAGGAGAACGCCAAGTACCTGATCGAGAAGATCAAGCTGCACGATAT
GCAGGAGGGCAAGTGTCTGTATAGCCTGGAGGCCATCCCTCTGGAGGACCTGCTGAACA
ATCCATTCAACTACGAGGTGGATCACATCATCCCCCGGAGCGTGAGCTTCGACAATTCCT
TTAACAATAAGGTGCTGGTGAAGCAGGAGGAGAACTCTAAGAAGGGCAATAGGACCCCT
TTCCAGTACCTGTCTAGCTCCGATTCTAAGATCAGCTACGAGACCTTCAAGAAGCACATC
CTGAATCTGGCCAAGGGCAAGGGCCGCATCTCTAAGACCAAGAAGGAGTACCTGCTGGA
GGAGCGGGACATCAACAGATTCAGCGTGCAGAAGGACTTCATCAACCGGAATCTGGTGG
ACACCAGATACGCCACACGCGGCCTGATGAATCTGCTGCGGTCCTATTTCAGAGTGAACA
ATCTGGATGTGAAGGTGAAGAGCATCAACGGCGGCTTCACCTCCTTTCTGCGGAGAAAG
TGGAAGTTTAAGAAGGAGAGAAACAAGGGCTATAAGCACCACGCCGAGGATGCCCTGAT
CATCGCCAATGCCGACTTCATCTTTAAGGAGTGGAAGAAGCTGGACAAGGCCAAGAAAG
TGATGGAGAACCAGATGTTCGAGGAGAAGCAGGCCGAGAGCATGCCCGAGATCGAGAC
CGAGCAGGAGTACAAGGAGATTTTCATCACACCTCACCAGATCAAGCACATCAAGGACT
TCAAGGACTACAAGTATTCCCACAGGGTGGATAAGAAGCCCAACCGCGAGCTGATCAAT
GACACCCTGTATTCTACAAGGAAGGACGATAAGGGCAATACCCTGATCGTGAACAATCT
GAACGGCCTGTACGACAAGGATAATGACAAGCTGAAGAAGCTGATCAACAAGAGCCCC
GAGAAGCTGCTGATGTACCACCACGATCCTCAGACATATCAGAAGCTGAAGCTGATCAT
GGAGCAGTACGGCGACGAGAAGAACCCACTGTATAAGTACTATGAGGAGACCGGCAACT
ACCTGACAAAGTATTCCAAGAAGGATAATGGCCCCGTGATCAAGAAGATCAAGTACTAT
GGCAACAAGCTGAATGCCCACCTGGACATCACCGACGATTACCCCAACAGCCGGAATAA
GGTGGTGAAGCTGAGCCTGAAGCCATACAGGTTCGACGTGTACCTGGACAACGGCGTGT
ATAAGTTTGTGACAGTGAAGAATCTGGATGTGATCAAGAAGGAGAACTACTATGAAGTG
AATAGCAAGTGCTACGAGGAGGCCAAGAAGCTGAAGAAGATCAGCAACCAGGCCGAGT
TCATCGCCTCTTTTTACAACAATGACCTGATCAAGATCAATGGCGAGCTGTATAGAGTGA
TCGGCGTGAACAATGATCTGCTGAACCGCATCGAAGTGAATATGATCGACATCACCTACC
GGGAGTATCTGGAGAACATGAATGATAAGAGGCCCCCTCGCATCATCAAGACCATCGCC
TCTAAGACACAGAGCATCAAGAAGTACTCTACAGACATCCTGGGCAACCTGTATGAGGT
GAAGAGCAAGAAGCACCCTCAGATCATCAAGAAGGGC.

In some embodiments comprising a nucleic acid encoding SaCas9, the SaCas9 comprises an amino acid sequence of SEQ ID NO: 711.

[0238] In some embodiments, the SaCas9 is a variant of the amino acid sequence of SEQ ID NO: 711. In some embodiments, the SaCas9 comprises an amino acid other than an E at the position corresponding to position 781 of SEQ ID NO: 711. In some embodiments, the SaCas9 comprises an amino acid other than an N at the position corresponding to position 967 of SEQ ID NO: 711. In some embodiments, the SaCas9 comprises an amino acid other than an R at the position corresponding to position 1014 of SEQ ID NO: 711. In some embodiments, the SaCas9 comprises a K at the position corresponding to position 781 of SEQ ID NO: 711. In some embodiments, the SaCas9 comprises a K at the position corresponding to position 967 of SEQ ID NO: 711. In some embodiments, the SaCas9 comprises an H at the position corresponding to position 1014 of SEQ ID NO: 711. In some embodiments, the SaCas9 comprises an amino acid other than an E at the position corresponding to position 781 of SEQ ID NO: 711; an amino acid other than an N at the position corresponding to position 967 of SEQ ID NO: 711; and an amino acid other than an R at the position corresponding to position 1014 of SEQ ID NO: 711. In some embodiments, the SaCas9 comprises a K at the position corresponding to position 781 of SEQ ID NO: 711; a K at the position corresponding to position 967 of SEQ ID NO: 711; and an H at the position corresponding to position 1014 of SEQ ID NO: 711.

[0239] In some embodiments, the SaCas9 comprises an amino acid other than an R at the position corresponding to position 244 of SEQ ID NO: 711. In some embodiments, the SaCas9 comprises an amino acid other than an N at the position corresponding to position 412 of SEQ ID NO: 711. In some embodiments, the SaCas9 comprises an amino acid other than an N at the position corresponding to position 418 of SEQ ID NO: 711. In some embodiments, the SaCas9 comprises an amino acid other than an R at the position corresponding to position 653 of SEQ ID NO: 711. In some embodiments, the SaCas9 comprises an amino acid other than an R at the position corresponding to position 244 of SEQ ID NO: 711; an amino acid other than an N at the position corresponding to position 412 of SEQ ID NO: 711; an amino acid other than an N at the position corresponding to position 418 of SEQ ID NO: 711; and an amino acid other than an R at the position corresponding to position 653 of SEQ ID NO: 711. In some embodiments, the SaCas9 comprises an A at the position corresponding to position 244 of SEQ ID NO: 711. In some embodiments, the SaCas9 comprises an A at the position corresponding to position 412 of SEQ ID NO: 711. In some embodiments, the SaCas9 comprises an A at the position corresponding to position 418 of SEQ ID NO: 711. In some embodiments, the SaCas9 comprises an A at the position corresponding to position 653 of SEQ ID NO: 711. In some embodiments, the SaCas9 comprises an A at the position corresponding to position 244 of SEQ ID NO: 711; an A at the position corresponding to position 412 of SEQ ID NO: 711; an A at the position corresponding to position 418 of SEQ ID NO: 711; and an A at the position corresponding to position 653 of SEQ ID NO: 711.

[0240] In some embodiments, the SaCas9 comprises an amino acid other than an R at the position corresponding to position 244 of SEQ ID NO: 711; an amino acid other than an N at the position corresponding to position 412 of SEQ ID NO: 711; an amino acid other than an N at the position corresponding to position 418 of SEQ ID NO: 711; an amino acid other than an R at the position corresponding to position 653 of SEQ ID NO: 711; an amino acid other than an E at the position corresponding to position 781 of SEQ ID NO: 711; an amino acid other than an N at the position corresponding to position 967 of SEQ ID NO: 711; and an amino acid other than an R at the position corresponding to position 1014 of SEQ ID NO: 711. In some embodiments, the SaCas9 comprises an A at the position corresponding to position 244 of SEQ ID NO: 711; an A at the position corresponding to position 412 of SEQ ID NO: 711; an A at the position corresponding to position 418 of SEQ ID NO: 711; an A at the position corresponding to position 653 of SEQ ID NO: 711; a K at the position corresponding to position 781 of SEQ ID NO: 711; a K at the position corresponding to position 967 of SEQ ID NO: 711; and an H at the position corresponding to position 1014 of SEQ ID NO: 711.

[0241] In some embodiments, the SaCas9 comprises an amino acid sequence that is at least 80%, 85%, 90%, 91%, 92%, 93%, 94%, 95%, 96%, 97%, 98%, 99% or 100% identical to the sequence of SEQ ID NO: 715 (designated herein as SaCas9-KKH or SACAS9KKH):

KRNYILGLDIGITSVGYGIIDYETRDVIDAGVRLFKEANVENNEGRRSKRGARRLKRRRRHRI
QRVKKLLFDYNLLTDHSELSGINPYEARVKGLSQKLSEEEFSAALLHLAKRRGVHNVNEVEE
DTGNELSTKEQISRNSKALEEKYVAELQLERLKKDGEVRGSINRFKTSDYVKEAKQLLKVQK
AYHQLDQSFIDTYIDLLETRRTYYEGPGEGSPFGWKDIKEWYEMLMGHCTYFPEELRSVKYA
YNADLYNALNDLNNLVITRDENEKLEYYEKFQIIENVFKQKKKPTLKQIAKEILVNEEDIKGY
RVTSTGKPEFTNLKVYHDIKDITARKEIIENAELLDQIAKILTIYQSSEDIQEELTNLNSELTQEE
IEQISNLKGYTGTHNLSLKAINLILDELWHTNDNQIAIFNRLKLVPKKVDLSQQKEIPTTLVDD
FILSPVVKRSFIQSIKVINAIIKKYGLPNDIIIELAREKNSKDAQKMINEMQKRNRQTNERIEEIIR
TTGKENAKYLIEKIKLHDMQEGKCLYSLEAIPLEDLLNNPFNYEVDHIIPRSVSFDNSFNNKVL
VKQEENSKKGNRTPFQYLSSSDSKISYETFKKHILNLAKGKGRISKTKKEYLLEERDINRFSVQ
KDFINRNLVDTRYATRGLMNLLRSYFRVNNLDVKVKSINGGFTSFLRRKWKFKKERNKGYK
HHAEDALIIANADFIFKEWKKLDKAKKVMENQMFEEKQAESMPEIETEQEYKEIFITPHQIKHI
KDFKDYKYSHRVDKKPNRKLINDTLYSTRKDDKGNTLIVNNLNGLYDKDNDKLKKLINKSP
EKLLMYHHDPQTYQKLKLIMEQYGDEKNPLYKYYEETGNYLTKYSKKDNGPVIKKIKYYGN
KLNAHLDITDDYPNSRNKVVKLSLKPYRFDVYLDNGVYKFVTVKNLDVIKKENYYEVNSKC
YEEAKKLKKISNQAEFIASFYKNDLIKINGELYRVIGVNNDLLNRIEVNMIDITYREYLENMN
DKRPPHIIKTIASKTQSIKKYSTDILGNLYEVKSKKHPQIIKKG.

[0242] In some embodiments, the SaCas9 comprises an amino acid sequence that is at least 80%, 85%, 90%, 91%, 92%, 93%, 94%, 95%, 96%, 97%, 98%, 99% or 100% identical to the sequence of SEQ ID NO: 716 (designated herein as SaCas9-HF):

KRNYILGLDIGITSVGYGIIDYETRDVIDAGVRLFKEANVENNEGRRSKRGARRLKRRRRHRI
QRVKKLLFDYNLLTDHSELSGINPYEARVKGLSQKLSEEEFSAALLHLAKRRGVHNVNEVEE
DTGNELSTKEQISRNSKALEEKYVAELQLERLKKDGEVRGSINRFKTSDYVKEAKQLLKVQK
AYHQLDQSFIDTYIDLLETRRTYYEGPGEGSPFGWKDIKEWYEMLMGHCTYFPEELASVKYA
YNADLYNALNDLNNLVITRDENEKLEYYEKFQIIENVFKQKKKPTLKQIAKEILVNEEDIKGY
RVTSTGKPEFTNLKVYHDIKDITARKEIIENAELLDQIAKILTIYQSSEDIQEELTNLNSELTQEE
IEQISNLKGYTGTHNLSLKAINLILDELWHTNDAQIAIFARLKLVPKKVDLSQQKEIPTTLVDD
FILSPVVKRSFIQSIKVINAIIKKYGLPNDIIIELAREKNSKDAQKMINEMQKRNRQTNERIEEIIR
TTGKENAKYLIEKIKLHDMQEGKCLYSLEAIPLEDLLNNPFNYEVDHIIPRSVSFDNSFNNKVL
VKQEENSKKGNRTPFQYLSSSDSKISYETFKKHILNLAKGKGRISKTKKEYLLEERDINRFSVQ
KDFINRNLVDTRYATAGLMNLLRSYFRVNNLDVKVKSINGGFTSFLRRKWKFKKERNKGYK
HHAEDALIIANADFIFKEWKKLDKAKKVMENQMFEEKQAESMPEIETEQEYKEIFITPHQIKHI
KDFKDYKYSHRVDKKPNRELINDTLYSTRKDDKGNTLIVNNLNGLYDKDNDKLKKLINKSP
EKLLMYHHDPQTYQKLKLIMEQYGDEKNPLYKYYEETGNYLTKYSKKDNGPVIKKIKYYGN
KLNAHLDITDDYPNSRNKVVKLSLKPYRFDVYLDNGVYKFVTVKNLDVIKKENYYEVNSKC
YEEAKKLKKISNQAEFIASFYNNDLIKINGELYRVIGVNNDLLNRIEVNMIDITYREYLENMN
DKRPPRIIKTIASKTQSIKKYSTDILGNLYEVKSKKHPQIIKKG.

[0243] In some embodiments, the SaCas9 comprises an amino acid sequence that is at least 80%, 85%, 90%, 91%, 92%, 93%, 94%, 95%, 96%, 97%, 98%, 99% or 100% identical to the sequence of SEQ ID NO: 717 (designated herein as SaCas9-KKH—HF):

KRNYILGLDIGITSVGYGIIDYETRDVIDAGVRLFKEANVENNEGRRSKRGARRLKRRRRHRI
QRVKKLLFDYNLLTDHSELSGINPYEARVKGLSQKLSEEEFSAALLHLAKRRGVHNVNEVEE
DTGNELSTKEQISRNSKALEEKYVAELQLERLKKDGEVRGSINRFKTSDYVKEAKQLLKVQK
AYHQLDQSFIDTYIDLLETRRTYYEGPGEGSPFGWKDIKEWYEMLMGHCTYFPEELASVKYA
YNADLYNALNDLNNLVITRDENEKLEYYEKFQIIENVFKQKKKPTLKQIAKEILVNEEDIKGY
RVTSTGKPEFTNLKVYHDIKDITARKEIIENAELLDQIAKILTIYQSSEDIQEELTNLNSELTQEE
IEQISNLKGYTGTHNLSLKAINLILDELWHTNDAQIAIFARLKLVPKKVDLSQQKEIPTTLVDD
FILSPVVKRSFIQSIKVINAIIKKYGLPNDIIIELAREKNSKDAQKMINEMQKRNRQTNERIEEIIR
TTGKENAKYLIEKIKLHDMQEGKCLYSLEAIPLEDLLNNPFNYEVDHIIPRSVSFDNSFNNKVL
VKQEENSKKGNRTPFQYLSSSDSKISYETFKKHILNLAKGKGRISKTKKEYLLEERDINRFSVQ
KDFINRNLVDTRYATAGLMNLLRSYFRVNNLDVKVKSINGGFTSFLRRKWKFKKERNKGYK
HHAEDALIIANADFIFKEWKKLDKAKKVMENQMFEEKQAESMPEIETEQEYKEIFITPHQIKHI
KDFKDYKYSHRVDKKPNRKLINDTLYSTRKDDKGNTLIVNNLNGLYDKDNDKLKKLINKSP
EKLLMYHHDPQTYQKLKLIMEQYGDEKNPLYKYYEETGNYLTKYSKKDNGPVIKKIKYYGN
KLNAHLDITDDYPNSRNKVVKLSLKPYRFDVYLDNGVYKFVTVKNLDVIKKENYYEVNSKC
YEEAKKLKKISNQAEFIASFYKNDLIKINGELYRVIGVNNDLLNRIEVNMIDITYREYLENMN
DKRPPHIIKTIASKTQSIKKYSTDILGNLYEVKSKKHPQIIKKG.

[0244] In some embodiments, the nucleic acid encoding SluCas9 encodes a SluCas9 comprising an amino acid sequence that is at least 80%, 85%, 90%, 91%, 92%, 93%, 94%, 95%, 96%, 97%, 98%, 99% or 100% identical to the sequence of SEQ ID NO: 712:

NQKFILGLDIGITSVGYGLIDYETKNIIDAGVRLFPEANVENNEGRRSKRGSRRLKRRRIHRLE
RVKKLLEDYNLLDQSQIPQSTNPYAIRVKGLSEALSKDELVIALLHIAKRRGIHKIDVIDSNDD
VGNELSTKEQLNKNSKLLKDKFVCQIQLERMNEGQVRGEKNRFKTADIIKEIIQLLNVQKNFH
QLDENFINKYIELVEMRREYFEGPGKGSPYGWEGDPKAWYETLMGHCTYFPDELRSVKYAY
SADLFNALNDLNNLVIQRDGLSKLEYHEKYHIIENVFKQKKKPTLKQIANEINVNPEDIKGYRI
TKSGKPQFTEFKLYHDLKSVLFDQSILENEDVLDQIAEILTIYQDKDSIKSKLTELDILLNEEDK
ENIAQLTGYTGTHRLSLKCIRLVLEEQWYSSRNQMEIFTHLNIKPKKINLTAANKIPKAMIDEF
ILSPVVKRTFGQAINLINKIIEKYGVPEDIIIELARENNSKDKQKFINEMQKKNENTRKRINEIIG
KYGNQNAKRLVEKIRLHDEQEGKCLYSLESIPLEDLLNNPNHYEVDHIIPRSVSFDNSYHNKV
LVKQSENSKKSNLTPYQYFNSGKSKLSYNQFKQHILNLSKSQDRISKKKKEYLLEERDINKFE
VQKEFINRNLVDTRYATRELTNYLKAYFSANNMNVKVKTINGSFTDYLRKVWKFKKERNH
GYKHHAEDALIIANADFLFKENKKLKAVNSVLEKPEIETKQLDIQVDSEDNYSEMFIIPKQVQ
DIKDFRNFKYSHRVDKKPNRQLINDTLYSTRKKDNSTYIVQTIKDIYAKDNTTLKKQFDKSPE
KFLMYQHDPRTFEKLEVIMKQYANEKNPLAKYHEETGEYLTKYSKKNNGPIVKSLKYIGNK
LGSHLDVTHQFKSSTKKLVKLSIKPYRFDVYLTDKGYKFITISYLDVLKKDNYYYIPEQKYDK
LKLGKAIDKNAKFIASFYKNDLIKLDGEIYKIIGVNSDTRNMIELDLPDIRYKEYCELNNIKGEP
RIKKTIGKKVNSIEKLTTDVLGNVFTNTQYTKPQLLFKRGN.

[0245] In some embodiments, the SluCas9 is a variant of the amino acid sequence of SEQ ID NO: 712. In some embodiments, the SluCas9 comprises an amino acid other than an Q at the position corresponding to position 781 of SEQ ID NO: 712. In some embodiments, the SluCas9 comprises an amino acid other than an R at the position corresponding to position 1013 of SEQ ID NO: 712. In some embodiments, the SluCas9 comprises a K at the position corresponding to position 781 of SEQ ID NO: 712. In some embodiments, the SluCas9 comprises a K at the position corresponding to position 966 of SEQ ID NO: 712. In some embodiments, the SluCas9 comprises an H at the position corresponding to position 1013 of SEQ ID NO: 712. In some embodiments, the SluCas9 comprises an amino acid other than an Q at the position corresponding to position 781 of SEQ ID NO: 712; and an amino acid other than an R at the position corresponding to position 1013 of SEQ ID NO: 712. In some embodiments, the SluCas9 comprises a K at the position corresponding to position 781 of SEQ ID NO: 712; a K at the position corresponding to position 966 of SEQ ID NO: 712; and an H at the position corresponding to position 1013 of SEQ ID NO: 712.

[0246] In some embodiments, the SluCas9 comprises an amino acid other than an R at the position corresponding to position 246 of SEQ ID NO: 712. In some embodiments, the SluCas9 comprises an amino acid other than an N at the position corresponding to position 414 of SEQ ID NO: 712. In some embodiments, the SluCas9 comprises an amino acid other than a T at the position corresponding to position 420 of SEQ ID NO: 712. In some embodiments, the SluCas9 comprises an amino acid other than an R at the position corresponding to position 655 of SEQ ID NO: 712. In some embodiments, the SluCas9 comprises an amino acid other than an R at the position corresponding to position 246 of SEQ ID NO: 712; an amino acid other than an N at the position corresponding to position 414 of SEQ ID NO: 712; an amino acid other than a T at the position corresponding to position 420 of SEQ ID NO: 712; and an amino acid other than an R at the position corresponding to position 655 of SEQ ID NO: 712. In some embodiments, the SluCas9 comprises an A at the position corresponding to position 246 of SEQ ID NO: 712. In some embodiments, the SluCas9 comprises an A at the position corresponding to position 414 of SEQ ID NO: 712. In some embodiments, the SluCas9 comprises an A at the position corresponding to position 420 of SEQ ID NO: 712. In some embodiments, the SluCas9 comprises an A at the position corresponding to position 655 of SEQ ID NO: 712. In some embodiments, the SluCas9 comprises an A at the position corresponding to position 246 of SEQ ID NO: 712; an A at the position corresponding to position 414 of SEQ ID NO: 712; an A at the position corresponding to position 420 of SEQ ID NO: 712; and an A at the position corresponding to position 655 of SEQ ID NO: 712.

[0247] In some embodiments, the SluCas9 comprises an amino acid other than an R at the position corresponding to position 246 of SEQ ID NO: 712; an amino acid other than an N at the position corresponding to position 414 of SEQ ID NO: 712; an amino acid other than a T at the position corresponding to position 420 of SEQ ID NO: 712; an amino acid other than an R at the position corresponding to position 655 of SEQ ID NO: 712; an amino acid other than an Q at the position corresponding to position 781 of SEQ ID NO: 712; a K at the position corresponding to position 966 of SEQ ID NO: 712; and an amino acid other than an R at the position corresponding to position 1013 of SEQ ID NO: 712. In some embodiments, the SluCas9 comprises an A at the position corresponding to position 246 of SEQ ID NO: 712; an A at the position corresponding to position 414 of SEQ ID NO: 712; an A at the position corresponding to position 420 of SEQ ID NO: 712; an A at the position corresponding to position 655 of SEQ ID NO: 712; a K at the position corresponding to position 781 of SEQ ID NO: 712; a K at the position corresponding to position 966 of SEQ ID NO: 712; and an H at the position corresponding to position 1013 of SEQ ID NO: 712.

[0248] In some embodiments, the SluCas9 comprises an amino acid sequence that is at least 80%, 85%, 90%, 91%, 92%, 93%, 94%, 95%, 96%, 97%, 98%, 99% or 100% identical to the sequence of SEQ ID NO: 718 (designated herein as SluCas9-KH or SLUCAS9KH):

NQKFILGLDIGITSVGYGLIDYETKNIIDAGVRLFPEANVENNEGRRSKRGSRRLKRRRIHRLE
RVKKLLEDYNLLDQSQIPQSTNPYAIRVKGLSEALSKDELVIALLHIAKRRGIHKIDVIDSNDD
VGNELSTKEQLNKNSKLLKDKFVCQIQLERMNEGQVRGEKNRFKTADIIKEIIQLLNVQKNFH
QLDENFINKYIELVEMRREYFEGPGKGSPYGWEGDPKAWYETLMGHCTYFPDELRSVKYAY
SADLFNALNDLNNLVIQRDGLSKLEYHEKYHIIENVFKQKKKPTLKQIANEINVNPEDIKGYRI
TKSGKPQFTEFKLYHDLKSVLFDQSILENEDVLDQIAEILTIYQDKDSIKSKLTELDILLNEEDK
ENIAQLTGYTGTHRLSLKCIRLVLEEQWYSSRNQMEIFTHLNIKPKKINLTAANKIPKAMIDEF
ILSPVVKRTFGQAINLINKIIEKYGVPEDIIIELARENNSKDKQKFINEMQKKNENTRKRINEIIG
KYGNQNAKRLVEKIRLHDEQEGKCLYSLESIPLEDLLNNPNHYEVDHIIPRSVSFDNSYHNKV
LVKQSENSKKSNLTPYQYFNSGKSKLSYNQFKQHILNLSKSQDRISKKKKEYLLEERDINKFE
VQKEFINRNLVDTRYATRELTNYLKAYFSANNMNVKVKTINGSFTDYLRKVWKFKKERNH
GYKHHAEDALIIANADFLFKENKKLKAVNSVLEKPEIETKQLDIQVDSEDNYSEMFIIPKQVQ
DIKDFRNFKYSHRVDKKPNRKLINDTLYSTRKKDNSTYIVQTIKDIYAKDNTTLKKQFDKSPE
KFLMYQHDPRTFEKLEVIMKQYANEKNPLAKYHEETGEYLTKYSKKNNGPIVKSLKYIGNK
LGSHLDVTHQFKSSTKKLVKLSIKPYRFDVYLTDKGYKFITISYLDVLKKDNYYYIPEQKYDK
LKLGKAIDKNAKFIASFYKNDLIKLDGEIYKIIGVNSDTRNMIELDLPDIRYKEYCELNNIKGEP
HIKKTIGKKVNSIEKLTTDVLGNVFTNTQYTKPQLLFKRGN.

[0249] In some embodiments, the SluCas9 comprises an amino acid sequence that is at least 80%, 85%, 90%, 91%, 92%, 93%, 94%, 95%, 96%, 97%, 98%, 99% or 100% identical to the sequence of SEQ ID NO: 719 (designated herein as SluCas9-HF):

NQKFILGLDIGITSVGYGLIDYETKNIIDAGVRLFPEANVENNEGRRSKRGSRRLKRRRIHRLE
RVKKLLEDYNLLDQSQIPQSTNPYAIRVKGLSEALSKDELVIALLHIAKRRGIHKIDVIDSNDD
VGNELSTKEQLNKNSKLLKDKFVCQIQLERMNEGQVRGEKNRFKTADIIKEIIQLLNVQKNFH
QLDENFINKYIELVEMRREYFEGPGKGSPYGWEGDPKAWYETLMGHCTYFPDELASVKYAY
SADLFNALNDLNNLVIQRDGLSKLEYHEKYHIIENVFKQKKKPTLKQIANEINVNPEDIKGYRI
TKSGKPQFTEFKLYHDLKSVLFDQSILENEDVLDQIAEILTIYQDKDSIKSKLTELDILLNEEDK
ENIAQLTGYTGTHRLSLKCIRLVLEEQWYSSRAQMEIFAHLNIKPKKINLTAANKIPKAMIDEF
ILSPVVKRTFGQAINLINKIIEKYGVPEDIIIELARENNSKDKQKFINEMQKKNENTRKRINEIIG
KYGNQNAKRLVEKIRLHDEQEGKCLYSLESIPLEDLLNNPNHYEVDHIIPRSVSFDNSYHNKV
LVKQSENSKKSNLTPYQYFNSGKSKLSYNQFKQHILNLSKSQDRISKKKKEYLLEERDINKFE
VQKEFINRNLVDTRYATAELTNYLKAYFSANNMNVKVKTINGSFTDYLRKVWKFKKERNH
GYKHHAEDALIIANADFLFKENKKLKAVNSVLEKPEIETKQLDIQVDSEDNYSEMFIIPKQVQ
DIKDFRNFKYSHRVDKKPNRQLINDTLYSTRKKDNSTYIVQTIKDIYAKDNTTLKKQFDKSPE
KFLMYQHDPRTFEKLEVIMKQYANEKNPLAKYHEETGEYLTKYSKKNNGPIVKSLKYIGNK
LGSHLDVTHQFKSSTKKLVKLSIKPYRFDVYLTDKGYKFITISYLDVLKKDNYYYIPEQKYDK
LKLGKAIDKNAKFIASFYKNDLIKLDGEIYKIIGVNSDTRNMIELDLPDIRYKEYCELNNIKGEP
RIKKTIGKKVNSIEKLTTDVLGNVFTNTQYTKPQLLFKRGN.

[0250] In some embodiments, the SluCas9 comprises an amino acid sequence that is at least 80%, 85%, 90%, 91%, 92%, 93%, 94%, 95%, 96%, 97%, 98%, 99% or 100% identical to the sequence of SEQ ID NO: 720 (designated herein as SluCas9-HF—KH):

NQKFILGLDIGITSVGYGLIDYETKNIIDAGVRLFPEANVENNEGRRSKRGSRRLKRRRIHRLE
RVKKLLEDYNLLDQSQIPQSTNPYAIRVKGLSEALSKDELVIALLHIAKRRGIHKIDVIDSNDD
VGNELSTKEQLNKNSKLLKDKFVCQIQLERMNEGQVRGEKNRFKTADIIKEIIQLLNVQKNFH
QLDENFINKYIELVEMRREYFEGPGKGSPYGWEGDPKAWYETLMGHCTYFPDELASVKYAY
SADLFNALNDLNNLVIQRDGLSKLEYHEKYHIIENVFKQKKKPTLKQIANEINVNPEDIKGYRI
TKSGKPQFTEFKLYHDLKSVLFDQSILENEDVLDQIAEILTIYQDKDSIKSKLTELDILLNEEDK
ENIAQLTGYTGTHRLSLKCIRLVLEEQWYSSRAQMEIFAHLNIKPKKINLTAANKIPKAMIDEF
ILSPVVKRTFGQAINLINKIIEKYGVPEDIIIELARENNSKDKQKFINEMQKKNENTRKRINEIIG
KYGNQNAKRLVEKIRLHDEQEGKCLYSLESIPLEDLLNNPNHYEVDHIIPRSVSFDNSYHNKV
LVKQSENSKKSNLTPYQYFNSGKSKLSYNQFKQHILNLSKSQDRISKKKKEYLLEERDINKFE
VQKEFINRNLVDTRYATAELTNYLKAYFSANNMNVKVKTINGSFTDYLRKVWKFKKERNH
GYKHHAEDALIIANADFLFKENKKLKAVNSVLEKPEIETKQLDIQVDSEDNYSEMFIIPKQVQ
DIKDFRNFKYSHRVDKKPNRKLINDTLYSTRKKDNSTYIVQTIKDIYAKDNTTLKKQFDKSPE
KFLMYQHDPRTFEKLEVIMKQYANEKNPLAKYHEETGEYLTKYSKKNNGPIVKSLKYIGNK
LGSHLDVTHQFKSSTKKLVKLSIKPYRFDVYLTDKGYKFITISYLDVLKKDNYYYIPEQKYDK
LKLGKAIDKNAKFIASFYKNDLIKLDGEIYKIIGVNSDTRNMIELDLPDIRYKEYCELNNIKGEP
HIKKTIGKKVNSIEKLTTDVLGNVFTNTQYTKPQLLFKRGN.

[0251] In some embodiments, the Cas protein is any of the engineered Cas proteins disclosed in Schmidt et al., 2021, Nature Communications, “Improved CRISPR genome editing using small highly active and specific engineered RNA-guided nucleases.”

[0252] In some embodiments, the Cas9 comprises an amino acid sequence that is at least 80%, 85%, 90%, 91%, 92%, 93%, 94%, 95%, 96%, 97%, 98%, 99% or 100% identical to the sequence of SEQ ID NO: 7021 (designated herein as sRGN1):

MNQKFILGLDIGITSVGYGLIDYETKNIIDAGVRLFPEANVENNEGRRSKRGSRRLKRRRIHRL
DRVKHLLAEYDLLDLTNIPKSTNPYQTRVKGLNEKLSKDELVIALLHIAKRRGIHNVDVAAD
KEETASDSLSTKDQINKNAKFLESRYVCELQKERLENEGHVRGVENRFLTKDIVREAKKIIDT
QMQYYPEIDETFKEKYISLVETRREYFEGPGKGSPFGWEGNIKKWFEQMMGHCTYFPEELRS
VKYSYSAELFNALNDLNNLVITRDEDAKLNYGEKFQIIENVFKQKKTPNLKQIAIEIGVHETEI
KGYRVNKSGTPEFTEFKLYHDLKSIVFDKSILENEAILDQIAEILTIYQDEQSIKEELNKLPEILN
EQDKAEIAKLIGYNGTHRLSLKCIHLINEELWQTSRNQMEIFNYLNIKPNKVDLSEQNKIPKD
MVNDFILSPVVKRTFIQSINVINKVIEKYGIPEDIIIELARENNSDDRKKFINNLQKKNEATRKRI
NEIIGQTGNQNAKRIVEKIRLHDQQEGKCLYSLKDIPLEDLLRNPNNYDIDHIIPRSVSFDDSM
HNKVLVRREQNAKKNNQTPYQYLTSGYADIKYSVFKQHVLNLAENKDRMTKKKREYLLEE
RDINKFEVQKEFINRNLVDTRYATRELTNYLKAYFSANNMNVKVKTINGSFTDYLRKVWKF
KKERNHGYKHHAEDALIIANADFLFKENKKLKAVNSVLEKPEIETKQLDIQVDSEDNYSEMFI
IPKQVQDIKDFRNFKYSHRVDKKPNRQLINDTLYSTRKKDNSTYIVQTIKDIYAKDNTTLKKQ
FDKSPEKFLMYQHDPRTFEKLEVIMKQYANEKNPLAKYHEETGEYLTKYSKKNNGPIVKSLK
YIGNKLGSHLDVTHQFKSSTKKLVKLSIKPYRFDVYLTDKGYKFITISYLDVLKKDNYYYIPE
QKYDKLKLGKAIDKNAKFIASFYKNDLIKLDGEIYKIIGVNSDTRNMIELDLPDIRYKEYCELN
NIKGEPRIKKTIGKKVNSIEKLTTDVLGNVFTNTQYTKPQLLFKRGN.

[0253] In some embodiments, the Cas9 comprises an amino acid sequence that is at least 80%, 85%, 90%, 91%, 92%, 93%, 94%, 95%, 96%, 97%, 98%, 99% or 100% identical to the sequence of SEQ ID NO: 7022 (designated herein as sRGN2):

MNQKFILGLDIGITSVGYGLIDYETKNIIDAGVRLFPEANVENNEGRRSKRGSRRLKRRRIHRL
ERVKSLLSEYKIISGLAPTNNQPYNIRVKGLTEQLTKDELAVALLHIAKRRGIHKIDVIDSNDD
VGNELSTKEQLNKNSKLLKDKFVCQIQLERMNEGQVRGEKNRFKTADIIKEIIQLLNVQKNFH
QLDENFINKYIELVEMRREYFEGPGQGSPFGWNGDLKKWYEMLMGHCTYFPQELRSVKYA
YSADLFNALNDLNNLIIQRDNSEKLEYHEKYHIIENVFKQKKKPTLKQIAKEIGVNPEDIKGYR
ITKSGTPEFTEFKLYHDLKSVLFDQSILENEDVLDQIAEILTIYQDKDSIKSKLTELDILLNEEDK
ENIAQLTGYNGTHRLSLKCIRLVLEEQWYSSRNQMEIFTHLNIKPKKINLTAANKIPKAMIDEF
ILSPVVKRTFIQSINVINKVIEKYGIPEDIIIELARENNSDDRKKFINNLQKKNEATRKRINEIIGQ
TGNQNAKRIVEKIRLHDQQEGKCLYSLESIALMDLLNNPQNYEVDHIIPRSVAFDNSIHNKVL
VKQIENSKKGNRTPYQYLNSSDAKLSYNQFKQHILNLSKSKDRISKKKKDYLLEERDINKFEV
QKEFINRNLVDTRYATRELTSYLKAYFSANNMDVKVKTINGSFTNHLRKVWRFDKYRNHGY
KHHAEDALIIANADFLFKENKKLKAVNSVLEKPEIETKQLDIQVDSEDNYSEMFIIPKQVQDIK
DFRNFKYSHRVDKKPNRQLINDTLYSTRKKDNSTYIVQTIKDIYAKDNTTLKKQFDKSPEKFL
MYQHDPRTFEKLEVIMKQYANEKNPLAKYHEETGEYLTKYSKKNNGPIVKSLKYIGNKLGS
HLDVTHQFKSSTKKLVKLSIKPYRFDVYLTDKGYKFITISYLDVLKKDNYYYIPEQKYDKLKL
GKAIDKNAKFIASFYKNDLIKLDGEIYKIIGVNSDTRNMIELDLPDIRYKEYCELNNIKGEPRIK
KTIGKKVNSIEKLTTDVLGNVFTNTQYTKPQLLFKRGN.

[0254] In some embodiments, the Cas9 comprises an amino acid sequence that is at least 80%, 85%, 90%, 91%, 92%, 93%, 94%, 95%, 96%, 97%, 98%, 99% or 100% identical to the sequence of SEQ ID NO: 7023 (designated herein as sRGN3):

MNQKFILGLDIGITSVGYGLIDYETKNIIDAGVRLFPEANVENNEGRRSKRGSRRLKRRRIHRL
ERVKLLLTEYDLINKEQIPTSNNPYQIRVKGLSEILSKDELAIALLHLAKRRGIHNVDVAADKE
ETASDSLSTKDQINKNAKFLESRYVCELQKERLENEGHVRGVENRFLTKDIVREAKKIIDTQM
QYYPEIDETFKEKYISLVETRREYFEGPGQGSPFGWNGDLKKWYEMLMGHCTYFPQELRSV
KYAYSADLFNALNDLNNLIIQRDNSEKLEYHEKYHIIENVFKQKKKPTLKQIAKEIGVNPEDIK
GYRITKSGTPEFTSFKLFHDLKKVVKDHAILDDIDLLNQIAEILTIYQDKDSIVAELGQLEYLM
SEADKQSISELTGYTGTHSLSLKCMNMIIDELWHSSMNQMEVFTYLNMRPKKYELKGYQRIP
TDMIDDAILSPVVKRTFIQSINVINKVIEKYGIPEDIIIELARENNSDDRKKFINNLQKKNEATRK
RINEIIGQTGNQNAKRIVEKIRLHDQQEGKCLYSLESIPLEDLLNNPNHYEVDHIIPRSVSFDNS
YHNKVLVKQSENSKKSNLTPYQYFNSGKSKLSYNQFKQHILNLSKSQDRISKKKKEYLLEER
DINKFEVQKEFINRNLVDTRYATRELTNYLKAYFSANNMNVKVKTINGSFTDYLRKVWKFK
KERNHGYKHHAEDALIIANADFLFKENKKLKAVNSVLEKPEIETKQLDIQVDSEDNYSEMFII
PKQVQDIKDFRNFKYSHRVDKKPNRQLINDTLYSTRKKDNSTYIVQTIKDIYAKDNTTLKKQF
DKSPEKFLMYQHDPRTFEKLEVIMKQYANEKNPLAKYHEETGEYLTKYSKKNNGPIVKSLK
YIGNKLGSHLDVTHQFKSSTKKLVKLSIKPYRFDVYLTDKGYKFITISYLDVLKKDNYYYIPE
QKYDKLKLGKAIDKNAKFIASFYKNDLIKLDGEIYKIIGVNSDTRNMIELDLPDIRYKEYCELN
NIKGEPRIKKTIGKKVNSIEKLTTDVLGNVFTNTQYTKPQLLFKRGN.

[0255] In some embodiments, the Cas9 comprises an amino acid sequence that is at least 80%, 85%, 90%, 91%, 92%, 93%, 94%, 95%, 96%, 97%, 98%, 99% or 100% identical to the sequence of SEQ ID NO: 7024 (designated herein as sRGN3.1):

MNQKFILGLDIGITSVGYGLIDYETKNIIDAGVRLFPEANVENNEGRRSKRGSRRLKRRRIHRL
ERVKLLLTEYDLINKEQIPTSNNPYQIRVKGLSEILSKDELAIALLHLAKRRGIHNVDVAADKE
ETASDSLSTKDQINKNAKFLESRYVCELQKERLENEGHVRGVENRFLTKDIVREAKKIIDTQM
QYYPEIDETFKEKYISLVETRREYFEGPGQGSPFGWNGDLKKWYEMLMGHCTYFPQELRSV
KYAYSADLFNALNDLNNLIIQRDNSEKLEYHEKYHIIENVFKQKKKPTLKQIAKEIGVNPEDIK
GYRITKSGTPEFTSFKLFHDLKKVVKDHAILDDIDLLNQIAEILTIYQDKDSIVAELGQLEYLM
SEADKQSISELTGYTGTHSLSLKCMNMIIDELWHSSMNQMEVFTYLNMRPKKYELKGYQRIP
TDMIDDAILSPVVKRTFIQSINVINKVIEKYGIPEDIIIELARENNSDDRKKFINNLQKKNEATRK
RINEIIGQTGNQNAKRIVEKIRLHDQQEGKCLYSLESIPLEDLLNNPNHYEVDHIIPRSVSFDNS
YHNKVLVKQSENSKKSNLTPYQYFNSGKSKLSYNQFKQHILNLSKSQDRISKKKKEYLLEER
DINKFEVQKEFINRNLVDTRYATRELTNYLKAYFSANNMNVKVKTINGSFTDYLRKVWKFK
KERNHGYKHHAEDALIIANADFLFKENKKLKAVNSVLEKPEIETKQLDIQVDSEDNYSEMFII
PKQVQDIKDFRNFKYSHRVDKKPNRQLINDTLYSTRKKDNSTYIVQTIKDIYAKDNTTLKKQF
DKSPEKFLMYQHDPRTFEKLEVIMKQYANEKNPLAKYHEETGEYLTKYSKKNNGPIVKSLK
YIGNKLGSHLDVTHQFKSSTKKLVKLSIKNYRFDVYLTEKGYKFVTIAYLNVFKKDNYYYIP
KDKYQELKEKKKIKDTDQFIASFYKNDLIKLNGDLYKIIGVNSDDRNIIELDYYDIKYKDYCEI
NNIKGEPRIKKTIGKKTESIEKFTTDVLGNLYLHSTEKAPQLIFKRGL.

[0256] In some embodiments, the Cas9 comprises an amino acid sequence that is at least 80%, 85%, 90%, 91%, 92%, 93%, 94%, 95%, 96%, 97%, 98%, 99% or 100% identical to the sequence of SEQ ID NO: 7025 (designated herein as sRGN3.2):

MNQKFILGLDIGITSVGYGLIDYETKNIIDAGVRLFPEANVENNEGRRSKRGSRRLKRRRIHRL
ERVKLLLTEYDLINKEQIPTSNNPYQIRVKGLSEILSKDELAIALLHLAKRRGIHNVDVAADKE
ETASDSLSTKDQINKNAKFLESRYVCELQKERLENEGHVRGVENRFLTKDIVREAKKIIDTQM
QYYPEIDETFKEKYISLVETRREYFEGPGQGSPFGWNGDLKKWYEMLMGHCTYFPQELRSV
KYAYSADLFNALNDLNNLIIQRDNSEKLEYHEKYHIIENVFKQKKKPTLKQIAKEIGVNPEDIK
GYRITKSGTPEFTSFKLFHDLKKVVKDHAILDDIDLLNQIAEILTIYQDKDSIVAELGQLEYLM
SEADKQSISELTGYTGTHSLSLKCMNMIIDELWHSSMNQMEVFTYLNMRPKKYELKGYQRIP
TDMIDDAILSPVVKRTFIQSINVINKVIEKYGIPEDIIIELARENNSDDRKKFINNLQKKNEATRK
RINEIIGQTGNQNAKRIVEKIRLHDQQEGKCLYSLESIPLEDLLNNPNHYEVDHIIPRSVSFDNS
YHNKVLVKQSENSKKSNLTPYQYFNSGKSKLSYNQFKQHILNLSKSQDRISKKKKEYLLEER
DINKFEVQKEFINRNLVDTRYATRELTNYLKAYFSANNMNVKVKTINGSFTDYLRKVWKFK
KERNHGYKHHAEDALIIANADFLFKENKKLKAVNSVLEKPEIETKQLDIQVDSEDNYSEMFII
PKQVQDIKDFRNFKFSHRVDKKPNRQLINDTLYSTRMKDEHDYIVQTITDIYGKDNTNLKKQ
FNKNPEKFLMYQNDPKTFEKLSIIMKQYSDEKNPLAKYYEETGEYLTKYSKKNNGPIVKKIK
LLGNKVGNHLDVTNKYENSTKKLVKLSIKNYRFDVYLTEKGYKFVTIAYLNVFKKDNYYYI
PKDKYQELKEKKKIKDTDQFIASFYKNDLIKLNGDLYKIIGVNSDDRNIIELDYYDIKYKDYC
EINNIKGEPRIKKTIGKKTESIEKFTTDVLGNLYLHSTEKAPQLIFKRGL.

[0257] In some embodiments, the Cas9 comprises an amino acid sequence that is at least 80%, 85%, 90%, 91%, 92%, 93%, 94%, 95%, 96%, 97%, 98%, 99% or 100% identical to the sequence of SEQ ID NO: 7026 (designated herein as sRGN3.3):

MNQKFILGLDIGITSVGYGLIDYETKNIIDAGVRLFPEANVENNEGRRSKRGSRRLKRRRIHRL
ERVKLLLTEYDLINKEQIPTSNNPYQIRVKGLSEILSKDELAIALLHLAKRRGIHNVDVAADKE
ETASDSLSTKDQINKNAKFLESRYVCELQKERLENEGHVRGVENRFLTKDIVREAKKIIDTQM
QYYPEIDETFKEKYISLVETRREYFEGPGQGSPFGWNGDLKKWYEMLMGHCTYFPQELRSV
KYAYSADLFNALNDLNNLIIQRDNSEKLEYHEKYHIIENVFKQKKKPTLKQIAKEIGVNPEDIK
GYRITKSGTPEFTSFKLFHDLKKVVKDHAILDDIDLLNQIAEILTIYQDKDSIVAELGQLEYLM
SEADKQSISELTGYTGTHSLSLKCMNMIIDELWHSSMNQMEVFTYLNMRPKKYELKGYQRIP
TDMIDDAILSPVVKRTFIQSINVINKVIEKYGIPEDIIIELARENNSDDRKKFINNLQKKNEATRK
RINEIIGQTGNQNAKRIVEKIRLHDQQEGKCLYSLESIPLEDLLNNPNHYEVDHIIPRSVSFDNS
YHNKVLVKQSENSKKSNLTPYQYFNSGKSKLSYNQFKQHILNLSKSQDRISKKKKEYLLEER
DINKFEVQKEFINRNLVDTRYATRELTSYLKAYFSANNMDVKVKTINGSFTNHLRKVWRFD
KYRNHGYKHHAEDALIIANADFLFKENKKLQNTNKILEKPTIENNTKKVTVEKEEDYNNVFE
TPKLVEDIKQYRDYKFSHRVDKKPNRQLINDTLYSTRMKDEHDYIVQTITDIYGKDNTNLKK
QFNKNPEKFLMYQNDPKTFEKLSIIMKQYSDEKNPLAKYYEETGEYLTKYSKKNNGPIVKKI
KLLGNKVGNHLDVTNKYENSTKKLVKLSIKNYRFDVYLTEKGYKFVTIAYLNVFKKDNYYY
IPKDKYQELKEKKKIKDTDQFIASFYKNDLIKLNGDLYKIIGVNSDDRNIIELDYYDIKYKDYC
EINNIKGEPRIKKTIGKKTESIEKFTTDVLGNLYLHSTEKAPQLIFKRGL.

[0258] In some embodiments, the Cas9 comprises an amino acid sequence that is at least 80%, 85%, 90%, 91%, 92%, 93%, 94%, 95%, 96%, 97%, 98%, 99% or 100% identical to the sequence of SEQ ID NO: 7027 (designated herein as sRGN4):

MNQKFILGLDIGITSVGYGLIDYETKNIIDAGVRLFPEANVENNEGRRSKRGSRRLKRRRIHRL
ERVKKLLEDYNLLDQSQIPQSTNPYAIRVKGLSEALSKDELVIALLHIAKRRGIHNINVSSEDE
DASNELSTKEQINRNNKLLKDKYVCEVQLQRLKEGQIRGEKNRFKTTDILKEIDQLLKVQKD
YHNLDIDFINQYKEIVETRREYFEGPGKGSPYGWEGDPKAWYETLMGHCTYFPDELRSVKY
AYSADLFNALNDLNNLVIQRDGLSKLEYHEKYHIIENVFKQKKKPTLKQIANEINVNPEDIKG
YRITKSGKPEFTSFKLFHDLKKVVKDHAILDDIDLLNQIAEILTIYQDKDSIVAELGQLEYLMS
EADKQSISELTGYTGTHSLSLKCMNMIIDELWHSSMNQMEVFTYLNMRPKKYELKGYQRIPT
DMIDDAILSPVVKRTFIQSINVINKVIEKYGIPEDIIIELARENNSDDRKKFINNLQKKNEATRKR
INEIIGQTGNQNAKRIVEKIRLHDQQEGKCLYSLESIPLEDLLNNPNHYEVDHIIPRSVSFDNSY
HNKVLVKQSENSKKSNLTPYQYFNSGKSKLSYNQFKQHILNLSKSQDRISKKKKEYLLEERDI
NKFEVQKEFINRNLVDTRYATRELTNYLKAYFSANNMNVKVKTINGSFTDYLRKVWKFKKE
RNHGYKHHAEDALIIANADFLFKENKKLKAVNSVLEKPEIETKQLDIQVDSEDNYSEMFIIPK
QVQDIKDFRNFKYSHRVDKKPNRQLINDTLYSTRKKDNSTYIVQTIKDIYAKDNTTLKKQFD
KSPEKFLMYQHDPRTFEKLEVIMKQYANEKNPLAKYHEETGEYLTKYSKKNNGPIVKSLKYI
GNKLGSHLDVTHQFKSSTKKLVKLSIKPYRFDVYLTDKGYKFITISYLDVLKKDNYYYIPEQK
YDKLKLGKAIDKNAKFIASFYKNDLIKLDGEIYKIIGVNSDTRNMIELDLPDIRYKEYCELNNI
KGEPRIKKTIGKKVNSIEKLTTDVLGNVFTNTQYTKPQLLFKRGN.

[0259] In some embodiments, the Cas9 comprises an amino acid sequence that is at least 80%, 85%, 90%, 91%, 92%, 93%, 94%, 95%, 96%, 97%, 98%, 99% or 100% identical to the sequence of SEQ ID NO: 7028 (designated herein as Staphylococcus hyicus Cas9 or ShyCas9):

MNNYILGLDIGITSVGYGIVDSDTREIKDAGVRLFPEANVDNNEGRRSKRGARRLKRRRIHRL
DRVKHLLAEYDLLDLTNIPKSTNPYQTRVKGLNEKLSKDELVIALLHIAKRRGIHNVNVMMD
DNDSGNELSTKDQLKKNAKALSDKYVCELQLERFEQDYKVRGEKNRFKTEDFVREARKLLE
TQSKFFEIDQTFIMRYIELIETRREYFEGPGKGSPFGWEGNIKKWFEQMMGHCTYFPEELRSV
KYSYSAELFNALNDLNNLVITRDEDAKLNYGEKFQIIENVFKQKKTPNLKQIAIEIGVHETEIK
GYRVNKSGKPEFTQFKLYHDLKNIFKDPKYLNDIQLMDNIAEIITIYQDAESIIKELNQLPELLS
EREKEKISALSGYSGTHRLSLKCINLLLDDLWESSLNQMELFTKLNLKPKKIDLSQQHKIPSKL
VDDFILSPVVKRAFIQSIQVVNAIIDKYGLPEDIIIELARENNSDDRRKFLNQLQKQNEETRKQV
EKVLREYGNDNAKRIVQKIKLHNMQEGKCLYSLKDIPLEDLLRNPHHYEVDHIIPRSVAFDNS
MHNKVLVRADENSKKGNRTPYQYLNSSESSLSYNEFKQHILNLSKTKDRITKKKREYLLEER
DINKFDVQKEFINRNLVDTRYATRELTSLLKAYFSANNLDVKVKTINGSFTNYLRKVWKFDK
DRNKGYKHHAEDALIIANADFLFKHNKKLRNINKVLDAPSKEVDKKRVTVQSEDEYNQIFED
TQKAQAIKKFEIRKFSHRVDKKPNRQLINDTLYSTRNIDGIEYVVESIKDIYSVNNDKVKTKFK
KDPHRLLMYRNDPQTFEKFEKVFKQYESEKNPFAKYYEETGEKIRKFSKTGQGPYINKIKYLR
ERLGRHCDVTNKYINSRNKIVQLKIYSYRFDIYQYGNNYKMITISYIDLEQKSNYYYISREKYE
QKKKDKQIDDSYKFIGSFYKNDIINYNGEMYRVIGVNDSEKNKIQLDMIDISIKDYMELNNIK
KTGVIYKTIGKSTTHIEKYTTDILGNLYKAAPPKKPQLIFK.

[0260] In some embodiments, the Cas9 comprises an amino acid sequence that is at least 80%, 85%, 90%, 91%, 92%, 93%, 94%, 95%, 96%, 97%, 98%, 99% or 100% identical to the sequence of SEQ ID NO: 7029 (designated herein as Staphylococcus microti Cas9 or Smi Cas9):

MEKDYILGLDIGIGSVGYGLIDYDTKSIIDAGVRLFPEANADNNLGRRAKRGARRLKRRRIHR
LERVKSLLSEYKIISGLAPTNNQPYNIRVKGLTEQLTKDELAVALLHIAKRRGIHNVDVAADK
EETASDSLSTKDQINKNAKFLESRYVCELQKERLENEGHVRGVENRFLTKDIVREAKKIIDTQ
MQYYPEIDETFKEKYISLVETRREYYEGPGKGSPYGWDADVKKWYQLMMGHCTYFPVEFRS
VKYAYTADLYNALNDLNNLTIARDDNPKLEYHEKYHIIENVFKQKRNPTLKQIAKEIGVNDI
NISGYRVTKSGKPQFTSFKLFHDLKKVVKDHAILDDIDLLNQIAEILTIYQDKDSIVAELGQLE
YLMSEADKQSISELTGYTGTHSLSLKCMNMIIDELWHSSMNQMEVFTYLNMRPKKYELKGY
QRIPTDMIDDAILSPVVKRSFKQAIGVVNAIIKKYGLPKDIIIELARESNSAEKSRYLRAIQKKN
EKTRERIEAIIKEYGNENAKGLVQKIKLHDAQEGKCLYSLKDIPLEDLLRNPNNYDIDHIIPRS
VSFDDSMHNKVLVRREQNAKKNNQTPYQYLTSGYADIKYSVFKQHVLNLAENKDRMTKKK
REYLLEERNINKYDVQKEFINRNLVDTRYTTRELTTLLKTYFTINNLDVKVKTINGSFTDFLR
KRWGFKKNRDEGYKHHAEDALIIANADYLFKEHKLLKEIKDVSDLAGDERNSNVKDEDQYE
EVFGGYFKIEDIKKYKIKKFSHRVDKKPNRQLINDTIYSTRVKDDKRYLINTLKNLYDKSNGD
LKERMQKDPESLLMYHHDPQTFEKLKIVMSQYENEKNPLAKYFEETGQYLTKYAKHDNGPA
IHKIKYYGNKLVEHLDITKNYHNPQNKVVQLSQKSFRFDVYQTDKGYKFISIAYLTLKNEKN
YYAISQEKYDQLKSEKKISNNAVFIGSFYTSDIIEINNEKFRVIGVNSDKNNLIEVDRIDIRQKEF
IELEEEKKNNRIKVTIGRKTTNIEKFHTDILGNMYKSKRPKAPQLVFKKG.

[0261] In some embodiments, the Cas9 comprises an amino acid sequence that is at least 80%, 85%, 90%, 91%, 92%, 93%, 94%, 95%, 96%, 97%, 98%, 99% or 100% identical to the sequence of SEQ ID NO: 7030 (designated herein as Staphylococcus pasteuri Cas9 or Spa Cas9):

MKEKYILGLDLGITSVGYGIINFETKKIIDAGVRLFPEANVDNNEGRRSKRGSRRLKRRRIHRL
ERVKLLLTEYDLINKEQIPTSNNPYQIRVKGLSEILSKDELAIALLHLAKRRGIHNINVSSEDED
ASNELSTKEQINRNNKLLKDKYVCEVQLQRLKEGQIRGEKNRFKTTDILKEIDQLLKVQKDY
HNLDIDFINQYKEIVETRREYFEGPGQGSPFGWNGDLKKWYEMLMGHCTYFPQELRSVKYA
YSADLFNALNDLNNLIIQRDNSEKLEYHEKYHIIENVFKQKKKPTLKQIAKEIGVNPEDIKGYR
ITKSGTPQFTEFKLYHDLKSIVFDKSILENEAILDQIAEILTIYQDEQSIKEELNKLPEILNEQDK
AEIAKLIGYNGTHRLSLKCIHLINEELWQTSRNQMEIFNYLNIKPNKVDLSEQNKIPKDMVND
FILSPVVKRTFIQSINVINKVIEKYGIPEDIIIELARENNSDDRKKFINNLQKKNEATRKRINEIIG
QTGNQNAKRIVEKIRLHDQQEGKCLYSLESIALMDLLNNPQNYEVDHIIPRSVAFDNSIHNKV
LVKQIENSKKGNRTPYQYLNSSDAKLSYNQFKQHILNLSKSKDRISKKKKDYLLEERDINKFE
VQKEFINRNLVDTRYATRELTSYLKAYFSANNMDVKVKTINGSFTNHLRKVWRFDKYRNHG
YKHHAEDALIIANADFLFKENKKLQNTNKILEKPTIENNTKKVTVEKEEDYNNVFETPKLVED
IKQYRDYKFSHRVDKKPNRQLINDTLYSTRMKDEHDYIVQTITDIYGKDNTNLKKQFNKNPE
KFLMYQNDPKTFEKLSIIMKQYSDEKNPLAKYYEETGEYLTKYSKKNNGPIVKKIKLLGNKV
GNHLDVTNKYENSTKKLVKLSIKNYRFDVYLTEKGYKFVTIAYLNVFKKDNYYYIPKDKYQ
ELKEKKKIKDTDQFIASFYKNDLIKLNGDLYKIIGVNSDDRNIIELDYYDIKYKDYCEINNIKG
EPRIKKTIGKKTESIEKFTTDVLGNLYLHSTEKAPQLIFKRGL.

[0262] In some embodiments, the Cas protein comprises an amino acid sequence that is at least 80%, 85%, 90%, 91%, 92%, 93%, 94%, 95%, 96%, 97%, 98%, 99% or 100% identical to the sequence of SEQ ID NO: 7031 (designated herein as Cas12i1):

MSNKEKNASETRKAYTTKMIPRSHDRMKLLGNFMDYLMDGTPIFFELWNQFGGGIDRDIISG
TANKDKISDDLLLAVNWFKVMPINSKPQGVSPSNLANLFQQYSGSEPDIQAQEYFASNFDTE
KHQWKDMRVEYERLLAELQLSRSDMHHDLKLMYKEKCIGLSLSTAHYITSVMFGTGAKNN
RQTKHQFYSKVIQLLEESTQINSVEQLASIILKAGDCDSYRKLRIRCSRKGATPSILKIVQDYEL
GTNHDDEVNVPSLIANLKEKLGRFEYECEWKCMEKIKAFLASKVGPYYLGSYSAMLENALS
PIKGMTTKNCKFVLKQIDAKNDIKYENEPFGKIVEGFFDSPYFESDTNVKWVLHPHHIGESNI
KTLWEDLNAIHSKYEEDIASLSEDKKEKRIKVYQGDVCQTINTYCEEVGKEAKTPLVQLLRY
LYSRKDDIAVDKIIDGITFLSKKHKVEKQKINPVIQKYPSFNFGNNSKLLGKIISPKDKLKHNL
KCNRNQVDNYIWIEIKVLNTKTMRWEKHHYALSSTRFLEEVYYPATSENPPDALAARFRTKT
NGYEGKPALSAEQIEQIRSAPVGLRKVKKRQMRLEAARQQNLLPRYTWGKDFNINICKRGN
NFEVTLATKVKKKKEKNYKVVLGYDANIVRKNTYAAIEAHANGDGVIDYNDLPVKPIESGF
VTVESQVRDKSYDQLSYNGVKLLYCKPHVESRRSFLEKYRNGTMKDNRGNNIQIDFMKDFE
AIADDETSLYYFNMKYCKLLQSSIRNHSSQAKEYREEIFELLRDGKLSVLKLSSLSNLSFVMF
KVAKSLIGTYFGHLLKKPKNSKSDVKAPPITDEDKQKADPEMFALRLALEEKRLNKVKSKKE
VIANKIVAKALELRDKYGPVLIKGENISDTTKKGKKSSTNSFLMDWLARGVANKVKEMVM
MHQGLEFVEVNPNFTSHQDPFVHKNPENTFRARYSRCTPSELTEKNRKEILSFLSDKPSKRPT
NAYYNEGAMAFLATYGLKKNDVLGVSLEKFKQIMANILHQRSEDQLLFPSRGGMFYLATYK
LDADATSVNWNGKQFWVCNADLVAAYNVGLVDIQKDFKKK.

[0263] In some embodiments, the Cas protein comprises an amino acid sequence that is at least 80%, 85%, 90%, 91%, 92%, 93%, 94%, 95%, 96%, 97%, 98%, 99% or 100% identical to the sequence of SEQ ID NO: 7032 (designated herein as Cas12i2):

MSSAIKSYKSVLRPNERKNQLLKSTIQCLEDGSAFFFKMLQGLFGGITPEIVRFSTEQEKQQQD
IALWCAVNWFRPVSQDSLTHTIASDNLVEKFEEYYGGTASDAIKQYFSASIGESYYWNDCRQ
QYYDLCRELGVEVSDLTHDLEILCREKCLAVATESNQNNSIISVLFGTGEKEDRSVKLRITKKI
LEAISNLKEIPKNVAPIQEIILNVAKATKETFRQVYAGNLGAPSTLEKFIAKDGQKEFDLKKLQ
TDLKKVIRGKSKERDWCCQEELRSYVEQNTIQYDLWAWGEMFNKAHTALKIKSTRNYNFA
KQRLEQFKEIQSLNNLLVVKKLNDFFDSEFFSGEETYTICVHHLGGKDLSKLYKAWEDDPAD
PENAIVVLCDDLKNNFKKEPIRNILRYIFTIRQECSAQDILAAAKYNQQLDRYKSQKANPSVL
GNQGFTWTNAVILPEKAQRNDRPNSLDLRIWLYLKLRHPDGRWKKHHIPFYDTRFFQEIYAA
GNSPVDTCQFRTPRFGYHLPKLTDQTAIRVNKKHVKAAKTEARIRLAIQQGTLPVSNLKITEIS
ATINSKGQVRIPVKFDVGRQKGTLQIGDRFCGYDQNQTASHAYSLWEVVKEGQYHKELGCF
VRFISSGDIVSITENRGNQFDQLSYEGLAYPQYADWRKKASKFVSLWQITKKNKKKEIVTVE
AKEKFDAICKYQPRLYKFNKEYAYLLRDIVRGKSLVELQQIRQEIFRFIEQDCGVTRLGSLSLS
TLETVKAVKGIIYSYFSTALNASKNNPISDEQRKEFDPELFALLEKLELIRTRKKKQKVERIAN
SLIQTCLENNIKFIRGEGDLSTTNNATKKKANSRSMDWLARGVFNKIRQLAPMHNITLFGCGS
LYTSHQDPLVHRNPDKAMKCRWAAIPVKDIGDWVLRKLSQNLRAKNIGTGEYYHQGVKEF
LSHYELQDLEEELLKWRSDRKSNIPCWVLQNRLAEKLGNKEAVVYIPVRGGRIYFATHKVAT
GAVSIVFDQKQVWVCNADHVAAANIALTVKGIGEQSSDEENPDGSRIKLQLTS.

### Modified Guide RNAs or Linkers

[0264] In some embodiments, the guide RNA (i.e., sgRNA within the tgRNA) and/or any of the linkers disclosed herein are chemically modified. A guide RNA or linker comprising one or more modified nucleosides or nucleotides is called a “modified” guide RNA or linker, or is called a “chemically modified” guide RNA or linker, to describe the presence of one or more non-naturally and/or naturally occurring components or configurations that are used instead of or in addition to the canonical A, G, C, and U residues. In some embodiments, a modified guide RNA or linker is synthesized with a non-canonical nucleoside or nucleotide, is here called “modified.” Modified nucleosides and nucleotides can include one or more of: (i) alteration, e.g., replacement, of one or both of the non-linking phosphate oxygens and/or of one or more of the linking phosphate oxygens in the phosphodiester backbone linkage (an exemplary backbone modification); (ii) alteration, e.g., replacement, of a constituent of the ribose sugar, e.g., of the 2′ hydroxyl on the ribose sugar (an exemplary sugar modification); (iii) wholesale replacement of the phosphate moiety with “dephospho” linkers (an exemplary backbone modification); (iv) modification or replacement of a naturally occurring nucleobase, including with a non-canonical nucleobase (an exemplary base modification); (v) replacement or modification of the ribose-phosphate backbone (an exemplary backbone modification); (vi) modification of the 3′ end or 5′ end of the oligonucleotide, e.g., removal, modification or replacement of a terminal phosphate group or conjugation of a moiety, cap or linker (such 3′ or 5′ cap modifications may comprise a sugar and/or backbone modification); and (vii) modification or replacement of the sugar (an exemplary sugar modification).

[0265] Chemical modifications such as those listed above can be combined to provide modified guide RNAs or linkers comprising nucleosides and nucleotides (collectively “residues”) that can have two, three, four, or more modifications. For example, a modified residue can have a modified sugar and a modified nucleobase, or a modified sugar and a modified phosphodiester. In some embodiments, every base of a guide RNA or linker is modified, e.g., all bases have a modified phosphate group, such as a phosphorothioate group. In certain embodiments, all, or substantially all, of the phosphate groups of a guide RNA or linker molecule are replaced with phosphorothioate groups. In some embodiments, modified guide RNAs comprise at least one modified residue at or near the 5′ end of the RNA. In some embodiments, modified guide RNAs comprise at least one modified residue at or near the 3′ end of the RNA.

[0266] In some embodiments, the guide RNA and/or linker comprises one, two, three or more modified residues. In some embodiments, at least 5% (e.g., at least 5%, at least 10%, at least 15%, at least 20%, at least 25%, at least 30%, at least 35%, at least 40%, at least 45%, at least 50%, at least 55%, at least 60%, at least 65%, at least 70%, at least 75%, at least 80%, at least 85%, at least 90%, at least 95%, or 100%) of the positions in a modified guide RNA and/or linker are modified nucleosides or nucleotides.

[0267] Unmodified nucleic acids can be prone to degradation by, e.g., intracellular nucleases or those found in serum. For example, nucleases can hydrolyze nucleic acid phosphodiester bonds. Accordingly, in one aspect the guide RNAs and/or linkers described herein can contain one or more modified nucleosides or nucleotides, e.g., to introduce stability toward intracellular or serum-based nucleases. In some embodiments, the modified guide RNA molecules and/or linkers described herein can exhibit a reduced innate immune response when introduced into a population of cells, both in vivo and ex vivo. The term “innate immune response” includes a cellular response to exogenous nucleic acids, including single stranded nucleic acids, which involves the induction of cytokine expression and release, particularly the interferons, and cell death.

[0268] In some embodiments of a backbone modification, the phosphate group of a modified residue can be modified by replacing one or more of the oxygens with a different substituent. Further, the modified residue, e.g., modified residue present in a modified nucleic acid, can include the wholesale replacement of an unmodified phosphate moiety with a modified phosphate group as described herein. In some embodiments, the backbone modification of the phosphate backbone can include alterations that result in either an uncharged linker or a charged linker with unsymmetrical charge distribution.

[0269] Examples of modified phosphate groups include, phosphorothioate, phosphoroselenates, borano phosphates, borano phosphate esters, hydrogen phosphonates, phosphoroamidates, alkyl or aryl phosphonates and phosphotriesters. The phosphorous atom in an unmodified phosphate group is achiral. However, replacement of one of the non-bridging oxygens with one of the above atoms or groups of atoms can render the phosphorous atom chiral. The stereogenic phosphorous atom can possess either the “R” configuration (herein Rp) or the “S” configuration (herein Sp). The backbone can also be modified by replacement of a bridging oxygen, (i.e., the oxygen that links the phosphate to the nucleoside), with nitrogen (bridged phosphoroamidates), sulfur (bridged phosphorothioates) and carbon (bridged methylenephosphonates). The replacement can occur at either linking oxygen or at both of the linking oxygens.

[0270] The phosphate group can be replaced by non-phosphorus containing connectors in certain backbone modifications. In some embodiments, the charged phosphate group can be replaced by a neutral moiety. Examples of moieties which can replace the phosphate group can include, without limitation, e.g., methyl phosphonate, hydroxylamino, siloxane, carbonate, carboxymethyl, carbamate, amide, thioether, ethylene oxide linker, sulfonate, sulfonamide, thioformacetal, formacetal, oxime, methyleneimino, methylenemethylimino, methylenehydrazo, methylenedimethylhydrazo and methyleneoxymethylimino.

[0271] Scaffolds that can mimic nucleic acids can also be constructed wherein the phosphate linker and ribose sugar are replaced by nuclease resistant nucleoside or nucleotide surrogates. Such modifications may comprise backbone and sugar modifications. In some embodiments, the nucleobases can be tethered by a surrogate backbone. Examples can include, without limitation, the morpholino, cyclobutyl, pyrrolidine and peptide nucleic acid (PNA) nucleoside surrogates.

[0272] The modified nucleosides and modified nucleotides can include one or more modifications to the sugar group, i.e. at sugar modification. For example, the 2′ hydroxyl group (OH) can be modified, e.g. replaced with a number of different “oxy” or “deoxy” substituents. In some embodiments, modifications to the 2′ hydroxyl group can enhance the stability of the nucleic acid since the hydroxyl can no longer be deprotonated to form a 2′-alkoxide ion.

[0273] Examples of 2′ hydroxyl group modifications can include alkoxy or aryloxy (OR, wherein “R” can be, e.g., alkyl, cycloalkyl, aryl, aralkyl, heteroaryl or a sugar); polyethyleneglycols (PEG), O(CH₂CH₂O)ₙCH₂CH₂OR wherein R can be, e.g., H or optionally substituted alkyl, and n can be an integer from 0 to 20 (e.g., from 0 to 4, from 0 to 8, from 0 to 10, from 0 to 16, from 1 to 4, from 1 to 8, from 1 to 10, from 1 to 16, from 1 to 20, from 2 to 4, from 2 to 8, from 2 to 10, from 2 to 16, from 2 to 20, from 4 to 8, from 4 to 10, from 4 to 16, and from 4 to 20). In some embodiments, the 2′ hydroxyl group modification can be 2-O-Me. In some embodiments, the 2′ hydroxyl group modification can be a 2′-fluoro modification, which replaces the 2′ hydroxyl group with a fluoride. In some embodiments, the 2′ hydroxyl group modification can include “locked” nucleic acids (LNA) in which the 2′ hydroxyl can be connected, e.g., by a C₁₋₆ alkylene or C₁₋₆ heteroalkylene bridge, to the 4′ carbon of the same ribose sugar, where exemplary bridges can include methylene, propylene, ether, or amino bridges; O-amino (wherein amino can be, e.g., NH₂; alkylamino, dialkylamino, heterocyclyl, arylamino, diarylamino, heteroarylamino, or diheteroarylamino, ethylenediamine, or polyamino) and aminoalkoxy, O(CH₂)ₙ-amino, (wherein amino can be, e.g., NH₂; alkylamino, dialkylamino, heterocyclyl, arylamino, diarylamino, heteroarylamino, or diheteroarylamino, ethylenediamine, or polyamino). In some embodiments, the 2′ hydroxyl group modification can include “unlocked” nucleic acids (UNA) in which the ribose ring lacks the C2′-C3′ bond. In some embodiments, the 2′ hydroxyl group modification can include the methoxyethyl group (MOE), (OCH₂CH₂OCH₃, e.g., a PEG derivative).

[0274] “Deoxy” 2′ modifications can include hydrogen (i.e. deoxyribose sugars, e.g., at the overhang portions of partially dsRNA); halo (e.g., bromo, chloro, fluoro, or iodo); amino (wherein amino can be, e.g., NH₂; alkylamino, dialkylamino, heterocyclyl, arylamino, diarylamino, heteroarylamino, diheteroarylamino, or amino acid); NH(CH₂CH₂NH)ₙCH₂CH₂— amino (wherein amino can be, e.g., as described herein), —NHC(O)R (wherein R can be, e.g., alkyl, cycloalkyl, aryl, aralkyl, heteroaryl or sugar), cyano; mercapto; alkyl-thio-alkyl; thioalkoxy; and alkyl, cycloalkyl, aryl, alkenyl and alkynyl, which may be optionally substituted with e.g., an amino as described herein.

[0275] The sugar modification can comprise a sugar group which may also contain one or more carbons that possess the opposite stereochemical configuration than that of the corresponding carbon in ribose. Thus, a modified nucleic acid can include nucleotides containing e.g., arabinose, as the sugar. The modified nucleic acids can also include abasic sugars. These abasic sugars can also be further modified at one or more of the constituent sugar atoms. The modified nucleic acids can also include one or more sugars that are in the L form, e.g. L-nucleosides.

[0276] The modified nucleosides and modified nucleotides described herein, which can be incorporated into a modified nucleic acid, can include a modified base, also called a nucleobase. Examples of nucleobases include, but are not limited to, adenine (A), guanine (G), cytosine (C), and uracil (U). These nucleobases can be modified or wholly replaced to provide modified residues that can be incorporated into modified nucleic acids. The nucleobase of the nucleotide can be independently selected from a purine, a pyrimidine, a purine analog, or pyrimidine analog. In some embodiments, the nucleobase can include, for example, naturally-occurring and synthetic derivatives of a base.

[0277] In embodiments employing a dual guide RNA, each of the crRNA and the tracr RNA can contain modifications. Such modifications may be at one or both ends of the crRNA and/or tracr RNA. In embodiments comprising sgRNA, one or more residues at one or both ends of the sgRNA may be chemically modified, and/or internal nucleosides may be modified, and/or the entire sgRNA may be chemically modified. Certain embodiments comprise a 5′ end modification. Certain embodiments comprise a 3′ end modification.

### Modifications of 2′-O-methyl are encompassed

[0278] Another chemical modification that has been shown to influence nucleotide sugar rings is halogen substitution. For example, 2′-fluoro (2′-F) substitution on nucleotide sugar rings can increase oligonucleotide binding affinity and nuclease stability. Modifications of 2′-fluoro (2′-F) are encompassed.

[0279] Phosphorothioate (PS) linkage or bond refers to a bond where a sulfur is substituted for one nonbridging phosphate oxygen in a phosphodiester linkage, for example in the bonds between nucleotides bases. When phosphorothioates are used to generate oligonucleotides, the modified oligonucleotides may also be referred to as S-oligos.

[0280] Abasic nucleotides refer to those which lack nitrogenous bases.

[0281] Inverted bases refer to those with linkages that are inverted from the normal 5′ to 3′ linkage (i.e., either a 5′ to 5′ linkage or a 3′ to 3′ linkage).

[0282] An abasic nucleotide can be attached with an inverted linkage. For example, an abasic nucleotide may be attached to the terminal 5′ nucleotide via a 5′ to 5′ linkage, or an abasic nucleotide may be attached to the terminal 3′ nucleotide via a 3′ to 3′ linkage. An inverted abasic nucleotide at either the terminal 5′ or 3′ nucleotide may also be called an inverted abasic end cap.

[0283] In some embodiments, one or more of the first three, four, or five nucleotides at the 5′ terminus, and one or more of the last three, four, or five nucleotides at the 3′ terminus are modified. In some embodiments, the modification is a 2′-O-Me, 2′-F, inverted abasic nucleotide, PS bond, or other nucleotide modification well known in the art to increase stability and/or performance.

[0284] In some embodiments, the first four nucleotides at the 5′ terminus, and the last four nucleotides at the 3′ terminus are linked with phosphorothioate (PS) bonds.

[0285] In some embodiments, the first three nucleotides at the 5′ terminus, and the last three nucleotides at the 3′ terminus comprise a 2′-O-methyl (2′-O-Me) modified nucleotide. In some embodiments, the first three nucleotides at the 5′ terminus, and the last three nucleotides at the 3′ terminus comprise a 2′-fluoro (2′-F) modified nucleotide.

### Determination of Efficacy of Guide RNAs

[0286] In some embodiments, the efficacy of a tgRNA is determined when delivered or expressed together with other components forming an RNP. In some embodiments, the tgRNA is expressed together with an endonuclease (e.g., SaCas9 or SluCas9). In some embodiments, the tgRNA is delivered to or expressed in a cell line that already stably expresses an endonuclease (e.g., SaCas9 or SluCas9). In some embodiments the tgRNA is delivered to a cell as part of an RNP. In some embodiments, the tgRNA is delivered to a cell along with a nucleic acid (e.g., mRNA) encoding an endonuclease (e.g., SaCas9 or SluCas9).

[0287] In some embodiments, the efficacy of a particular tgRNA is determined based on in vitro models. In some embodiments, the in vitro model is a cell line.

[0288] In some embodiments, the efficacy of particular tgRNA is determined across multiple in vitro cell models for a tgRNA selection process. In some embodiments, a cell line comparison of data with selected tgRNAs is performed. In some embodiments, cross screening in multiple cell models is performed.

[0289] In some embodiments, the efficacy of particular tgRNAs is determined based on in vivo models. In some embodiments, the in vivo model is a rodent model. In some embodiments, the rodent model is a mouse which expresses, for example, a mutated dystrophin gene. In some embodiments, the in vivo model is a non-human primate, for example cynomolgus monkey.

TABLE 2
2. Exemplary Linker Sequences

| | | SEQ |
|---|---|---|
| Linker Description | Linker Sequence | ID NO. |
| 10 nucleotide linker | TCTATTGACA | 100 |
| 20 nucleotide linker | TCTATATGAGAAGAATGACA | 101 |
| 30 nucleotide linker | TCTATATGAGACCGACAATTAAGAATGACA | 102 |
| 40 nucleotide linker | TCTATATGAGACCGACAATGCCCCACAATTAAGAATGACA | 103 |
| 50 nucleotide linker | TCTATATGAGACCGACAATGCAGCTGAGAACCCCACAATTAAGAATGACA | 104 |
| 100 nucleotide linker | TACAATATGTAGGAGTGAGAGTGGTAAGGACATCAGCGATTAGGACGATAGGAATTCAGGTAACG | 105 |
| | GGCTTATACTGTCTGGTCATGACGAGGTAAAGGTG | |
| 200 nucleotide linker | ATAACATGAAACATTACACAATACACAATCATAGGTTACCATGCTTACCACTCTGCTTAAACTGC | 106 |
| | CCTCTAATACCTTATCCTACTCAGCTTCAGACATCGCACTCCACTCGCATAACAGTTACGCTTCG | |
| | ACTCAGCGCATCAAGATAACTCTACCAACTTCGTATAGCAATATTCAGGTCGTCGAATTCCCCAC | |
| | ACGTA | |
| 20 nucleotide linker | AAGAATGACATCTATATGAG | 112 |
| (v2) | | |
| 20 nucleotide linker | GATACATAGAACATTCAACC | 113 |
| (v3) | | |
| 20 nucleotide linker | CGACTCAGCGCATCAAGATT | 114 |
| (v4) | | |
| TAR RNA with 10 | TCTATATGAGGGGTCTCTCTAGTTAGACCAGATTTGAGCCTGGGGGCTCTCTGGCTAGCTGGGGA | 115 |
| nucleotide flanks | ACCCACAAGAATGACA | |
| P4-P6 RNA with 10 | TCTATATGAGGGAATTGCGGGAAAGGGGTCAACAGCCGTTCAGTACCAAGTCTCAGGGGAAACTT | 116 |
| nucleotide flanks | TGAGATGGCCTTGCAAAGGGTATGGTAATAAGCTGACGGACATGGTCCTAACCACGCAGCCAAGT | |
| | CCTAAGTCAACAGATCTTCTGTTGATATGGATGCAGTTCAAGAATGACA | |
| 20 nucleotide linker | TCTATATGAGAAGAATGATG | 117 |
| (4 nucleotides | | |
| complementary to | | |
| genomic target at 3′ | | |
| end of linker) | | |
| 20 nucleotide linker | TCTATATGAGAAGAATAGTG | 118 |
| (2 nucleotides | | |
| complementary to | | |
| genomic target at 3′ | | |
| end of linker) | | |
| 20 nucleotide linker | TATATATGAGAATAATTACA | 119 |
| (v5) | | |
| 20 nucleotide linker | TATATATTATAATAATTATA | 120 |
| (v6) | | |

TABLE 3
3. Exon 45, 51, 53 Guides Sequences:

| Seq | | |
|---|---|---|
| ID No. | Guide ID | Guide Sequence |
| 200 | E45Sa1 | TCAGGCTTCCCAATTTTTCCTG |
| 201 | E45Sa2 | TAGAATACTGGCATCTGTTTTT |
| 202 | E45Sa3 | TGGCATCTGTTTTTGAGGATTG |
| 203 | E45Sa4 | TTGCCGCTGCCCAATGCCATCC |
| 204 | E45Sa6 | TCTACAGGAAAAATTGGGAAGC |
| 205 | E45Sa7 | GCGGCAAACTGTTGTCAGAACA |
| 206 | E45Sa8 | TTTTGGTATCTTACAGGAACTC |
| 207 | E45SaCas9KKH1 | TGTTTGCAGACCTCCTGCCACC |
| 208 | E45SaCas9KKH2 | CTGCCACCGCAGATTCAGGCTT |
| 209 | E45SaCas9KKH3 | TCAGGCTTCCCAATTTTTCCTG |
| 210 | E45SaCas9KKH4 | TAGAATACTGGCATCTGTTTTT |
| 211 | E45SaCas9KKH5 | TGGCATCTGTTTTTGAGGATTG |
| 212 | E45SaCas9KKH6 | AGGATTGCTGAATTATTTCTTC |
| 213 | E45SaCas9KKH7 | AATTATTTCTTCCCCAGTTGCA |
| 214 | E45SaCas9KKH8 | CAGTTGCATTCAATGTTCTGAC |
| 215 | E45SaCas9KKH9 | TTCTGACAACAGTTTGCCGCTG |
| 216 | E45SaCas9KKH10 | TTGCCGCTGCCCAATGCCATCC |
| 217 | E45SaCas9KKH16 | AAACAGCTGTCAGACAGAAAAA |
| 218 | E45SaCas9KKH17 | GAAGCCTGAATCTGCGGTGGCA |
| 219 | E45SaCas9KKH18 | GAAAAATTGGGAAGCCTGAATC |
| 220 | E45SaCas9KKH19 | TCTACAGGAAAAATTGGGAAGC |
| 221 | E45SaCas9KKH20 | ACAGATGCCAGTATTCTACAGG |
| 222 | E45SaCas9KKH21 | TCAGCAATCCTCAAAAACAGAT |
| 223 | E45SaCas9KKH22 | AATAATTCAGCAATCCTCAAAA |
| 224 | E45SaCas9KKH23 | GCAACTGGGGAAGAAATAATTC |
| 225 | E45SaCas9KKH24 | CATTGAATGCAACTGGGGAAGA |
| 226 | E45SaCas9KKH25 | GAACATTGAATGCAACTGGGGA |
| 227 | E45SaCas9KKH26 | GCGGCAAACTGTTGTCAGAACA |
| 228 | E45SaCas9KKH27 | TTTTGGTATCTTACAGGAACTC |
| 229 | E45Slu1 | AGACCTCCTGCCACCGCAGATT |
| 230 | E45Slu2 | TCCCAATTTTTCCTGTAGAATA |
| 231 | E45Slu3 | TAGAATACTGGCATCTGTTTTT |
| 232 | E45Slu4 | TTTGCCGCTGCCCAATGCCATC |
| 233 | E45Slu7 | CTGTCAGACAGAAAAAAGAGGT |
| 234 | E45Slu8 | GCTGTCAGACAGAAAAAAGAGG |
| 235 | E45Slu9 | AACAGCTGTCAGACAGAAAAAA |
| 236 | E45Slu10 | AAGCCTGAATCTGCGGTGGCAG |
| 237 | E45Slu11 | GGGAAGCCTGAATCTGCGGTGG |
| 238 | E45Slu12 | AATTGGGAAGCCTGAATCTGCG |
| 239 | E45Slu13 | AAAAATTGGGAAGCCTGAATCT |
| 240 | E45Slu14 | GCCAGTATTCTACAGGAAAAAT |
| 241 | E45Slu15 | TGCCAGTATTCTACAGGAAAAA |
| 242 | E45Slu16 | AAAAACAGATGCCAGTATTCTA |
| 243 | E45Slu17 | TGTCAGAACATTGAATGCAACT |
| 244 | E45Slu18 | TTGTCAGAACATTGAATGCAAC |
| 245 | E45Slu19 | GTTGTCAGAACATTGAATGCAA |
| 246 | E45Slu20 | AACTCCAGGATGGCATTGGGCA |
| 247 | E45Slu21 | TACAGGAACTCCAGGATGGCAT |
| 248 | E45Slu22 | TTACAGGAACTCCAGGATGGCA |
| 249 | E45Slu23 | GGTATCTTACAGGAACTCCAGG |
| 250 | E45Slu24 | TTTTGGTATCTTACAGGAACTC |
| 251 | E51Sa1 | TAGTAACCACAGGTTGTGTCAC |
| 252 | E51Sa2 | GTTGTGTCACCAGAGTAACAGT |
| 253 | E51Sa4 | GAGGGTGATGGTGGGTGACCTT |
| 254 | E51Sa5 | TATAAAATCACAGAGGGTGATG |
| 255 | E51Sa6 | TTGATCAAGTTATAAAATCACA |
| 256 | E51SaCas9KKH1 | TCATTTTTTCTCATACCTTCTG |
| 257 | E51SaCas9KKH2 | TTTTTTCTCATACCTTCTGCTT |
| 258 | E51SaCas9KKH3 | CCTTCTGCTTGATGATCATCTC |
| 259 | E51SaCas9KKH4 | ATGATCATCTCGTTGATATCCT |
| 260 | E51SaCas9KKH5 | AAGGTCACCCACCATCACCCTC |
| 261 | E51SaCas9KKH6 | ATCACCCTCTGTGATTTTATAA |
| 262 | E51SaCas9KKH7 | ATAACTTGATCAAGCAGAGAAA |
| 263 | E51SaCas9KKH8 | CTTGATCAAGCAGAGAAAGCCA |
| 264 | E51SaCas9KKH9 | ATCAAGCAGAGAAAGCCAGTCG |
| 265 | E51SaCas9KKH10 | CAGTCGGTAAGTTCTGTCCAAG |
| 266 | E51SaCas9KKH11 | GTAAGTTCTGTCCAAGCCCGGT |
| 267 | E51SaCas9KKH12 | AGCCCGGTTGAAATCTGCCAGA |
| 268 | E51SaCas9KKH13 | AGCAGGTACCTCCAACATCAAG |
| 269 | E51SaCas9KKH14 | CAACATCAAGGAAGATGGCATT |
| 270 | E51SaCas9KKH15 | AGGAAGATGGCATTTCTAGTTT |
| 271 | E51SaCas9KKH16 | ATGGCATTTCTAGTTTGGAGAT |
| 272 | E51SaCas9KKH17 | CTAGTTTGGAGATGGCAGTTTC |
| 273 | E51SaCas9KKH18 | GATGGCAGTTTCCTTAGTAACC |
| 274 | E51SaCas9KKH19 | TAGTAACCACAGGTTGTGTCAC |
| 275 | E51SaCas9KKH20 | CCACAGGTTGTGTCACCAGAGT |
| 276 | E51SaCas9KKH21 | GTTGTGTCACCAGAGTAACAGT |
| 277 | E51SaCas9KKH22 | GAGTAACAGTCTGAGTAGGAGC |
| 278 | E51SaCas9KKH23 | TCTGAGTAGGAGCTAAAATATT |
| 279 | E51SaCas9KKH24 | AGAAGGTATGAGAAAAAATGAT |
| 280 | E51SaCas9KKH25 | TCAAGCAGAAGGTATGAGAAAA |
| 281 | E51SaCas9KKH26 | TCATCAAGCAGAAGGTATGAGA |
| 282 | E51SaCas9KKH27 | TCAACGAGATGATCATCAAGCA |
| 283 | E51SaCas9KKH28 | GTGACCTTGAGGATATCAACGA |
| 284 | E51SaCas9KKH29 | TGGGTGACCTTGAGGATATCAA |
| 285 | E51SaCas9KKH30 | GAGGGTGATGGTGGGTGACCTT |
| 286 | E51SaCas9KKH31 | TATAAAATCACAGAGGGTGATG |
| 287 | E51SaCas9KKH32 | AAGTTATAAAATCACAGAGGGT |
| 288 | E51SaCas9KKH33 | ATCAAGTTATAAAATCACAGAG |
| 289 | E51SaCas9KKH34 | TTGATCAAGTTATAAAATCACA |
| 290 | E51SaCas9KKH35 | CTTTCTCTGCTTGATCAAGTTA |
| 291 | E51SaCas9KKH36 | CCGACTGGCTTTCTCTGCTTGA |
| 292 | E51SaCas9KKH37 | ACTTACCGACTGGCTTTCTCTG |
| 293 | E51SaCas9KKH38 | GATGTTGGAGGTACCTGCTCTG |
| 294 | E51SaCas9KKH39 | AAATGCCATCTTCCTTGATGTT |
| 295 | E51SaCas9KKH40 | CCAAACTAGAAATGCCATCTTC |
| 296 | E51SaCas9KKH41 | AGGAAACTGCCATCTCCAAACT |
| 297 | E51SaCas9KKH42 | CTGTTACTCTGGTGACACAACC |
| 298 | E51SaCas9KKH43 | TAGCTCCTACTCAGACTGTTAC |
| 299 | E51Slu1 | TGATCATCTCGTTGATATCCTC |
| 300 | E51Slu2 | TTGATCAAGCAGAGAAAGCCAG |
| 301 | E51Slu3 | AGTCGGTAAGTTCTGTCCAAGC |
| 302 | E51Slu4 | GCCCGGTTGAAATCTGCCAGAG |
| 303 | E51Slu5 | CAGAGCAGGTACCTCCAACATC |
| 304 | E51Slu6 | GGTACCTCCAACATCAAGGAAG |
| 305 | E51Slu7 | CAAGGAAGATGGCATTTCTAGT |
| 306 | E51Slu8 | AGATGGCATTTCTAGTTTGGAG |
| 307 | E51Slu9 | ATGGCAGTTTCCTTAGTAACCA |
| 308 | E51Slu10 | GTCACCAGAGTAACAGTCTGAG |
| 309 | E51Slu15 | CAACGAGATGATCATCAAGCAG |
| 310 | E51Slu16 | GAGGGTGATGGTGGGTGACCTT |
| 311 | E51Slu17 | ATAAAATCACAGAGGGTGATGG |
| 312 | E51Slu18 | TATAAAATCACAGAGGGTGATG |
| 313 | E51Slu19 | AGTTATAAAATCACAGAGGGTG |
| 314 | E51Slu20 | TGATCAAGTTATAAAATCACAG |
| 315 | E51Slu21 | TTGATCAAGTTATAAAATCACA |
| 316 | E51Slu22 | GGGCTTGGACAGAACTTACCGA |
| 317 | E51Slu23 | CTCTGGCAGATTTCAACCGGGC |
| 318 | E51Slu24 | ACCTGCTCTGGCAGATTTCAAC |
| 319 | E51Slu25 | TACCTGCTCTGGCAGATTTCAA |
| 320 | E51Slu26 | CTTGATGTTGGAGGTACCTGCT |
| 321 | E51Slu27 | AATGCCATCTTCCTTGATGTTG |
| 322 | E51Slu28 | AGAAATGCCATCTTCCTTGATG |
| 323 | E51Slu29 | GGTGACACAACCTGTGGTTACT |
| 324 | E51Slu30 | TGTTACTCTGGTGACACAACCT |
| 325 | E51Slu31 | AGCTCCTACTCAGACTGTTACT |
| 326 | E53Sa1 | CCTTGGTTTCTGTGATTTTCTT |
| 327 | E53Sa2 | TCCTTAGCTTCCAGCCATTGTG |
| 328 | E53Sa3 | CTTGTACTTCATCCCACTGATT |
| 329 | E53Sa4 | ACTGATTCTGAATTCTTTCAAC |
| 330 | E53Sa5 | AGCCAAGCTTGAGTCATGGAAG |
| 331 | E53Sa6 | TTAGGACAGGCCAGAGCCAAGC |
| 332 | E53Sa7 | GCAACAGTTGAATGAAATGTTA |
| 333 | E53Sa8 | CCTTCAGAACCGGAGGCAACAG |
| 334 | E53Sa9 | AGTTGAAAGAATTCAGAATCAG |
| 335 | E53Sa10 | TTTTATTCTAGTTGAAAGAATT |
| 336 | E53Sa11 | TTTTTCCTTTTATTCTAGTTGA |
| 337 | E53SaCas9KKH1 | AAAAGGTATCTTTGATACTAAC |
| 338 | E53SaCas9KKH2 | CTTTGATACTAACCTTGGTTTC |
| 339 | E53SaCas9KKH3 | CCTTGGTTTCTGTGATTTTCTT |
| 340 | E53SaCas9KKH4 | TCCTTAGCTTCCAGCCATTGTG |
| 341 | E53SaCas9KKH5 | AACATTTCATTCAACTGTTGCC |
| 342 | E53SaCas9KKH6 | TTCAACTGTTGCCTCCGGTTCT |
| 343 | E53SaCas9KKH7 | AGGTGTTCTTGTACTTCATCCC |
| 344 | E53SaCas9KKH8 | CTTGTACTTCATCCCACTGATT |
| 345 | E53SaCas9KKH9 | ACTGATTCTGAATTCTTTCAAC |
| 346 | E53SaCas9KKH10 | TTCTTTCAACTAGAATAAAAGG |
| 347 | E53SaCas9KKH11 | TTCAACTAGAATAAAAGGAAAA |
| 348 | E53SaCas9KKH12 | AGAATAAAAGGAAAAATAAATA |
| 349 | E53SaCas9KKH13 | GTTAGTATCAAAGATACCTTTT |
| 350 | E53SaCas9KKH14 | CACAGAAACCAAGGTTAGTATC |
| 351 | E53SaCas9KKH15 | AAAGAAAATCACAGAAACCAAG |
| 352 | E53SaCas9KKH16 | TCCAAAAGAAAATCACAGAAAC |
| 353 | E53SaCas9KKH17 | ATACAGTAGATGCAATCCAAAA |
| 354 | E53SaCas9KKH18 | AGGAGGGTCCCTATACAGTAGA |
| 355 | E53SaCas9KKH19 | ATGGAAGGAGGGTCCCTATACA |
| 356 | E53SaCas9KKH20 | AGTCATGGAAGGAGGGTCCCTA |
| 357 | E53SaCas9KKH21 | AGCCAAGCTTGAGTCATGGAAG |
| 358 | E53SaCas9KKH22 | TTAGGACAGGCCAGAGCCAAGC |
| 359 | E53SaCas9KKH23 | TGGAAGCTAAGGAAGAAGCTGA |
| 360 | E53SaCas9KKH24 | AATGAAATGTTAAAGGATTCAA |
| 361 | E53SaCas9KKH25 | GCAACAGTTGAATGAAATGTTA |
| 362 | E53SaCas9KKH26 | AGAACCGGAGGCAACAGTTGAA |
| 363 | E53SaCas9KKH27 | CCTTCAGAACCGGAGGCAACAG |
| 364 | E53SaCas9KKH28 | GAACACCTTCAGAACCGGAGGC |
| 365 | E53SaCas9KKH29 | AAAGAATTCAGAATCAGTGGGA |
| 366 | E53SaCas9KKH30 | AGTTGAAAGAATTCAGAATCAG |
| 367 | E53SaCas9KKH31 | ATTCTAGTTGAAAGAATTCAGA |
| 368 | E53SaCas9KKH32 | TTTTATTCTAGTTGAAAGAATT |
| 369 | E53SaCas9KKH33 | TTTTTCCTTTTATTCTAGTTGA |
| 370 | E53SaCas9KKH34 | ATATATTTATTTTTCCTTTTAT |
| 371 | E53Slu2 | CCTTGGTTTCTGTGATTTTCTT |
| 372 | E53Slu3 | CTTTTGGATTGCATCTACTGTA |
| 373 | E53Slu4 | TTTTGGATTGCATCTACTGTAT |
| 374 | E53Slu5 | ACCCTCCTTCCATGACTCAAGC |
| 375 | E53Slu6 | CTTCCATGACTCAAGCTTGGCT |
| 376 | E53Slu7 | ACATTTCATTCAACTGTTGCCT |
| 377 | E53Slu8 | TCAACTGTTGCCTCCGGTTCTG |
| 378 | E53Slu10 | CCAAAAGAAAATCACAGAAACC |
| 379 | E53Slu11 | GCCAAGCTTGAGTCATGGAAGG |
| 380 | E53Slu12 | AGCCAAGCTTGAGTCATGGAAG |
| 381 | E53Slu13 | CAGAGCCAAGCTTGAGTCATGG |
| 382 | E53Slu14 | AGGCCAGAGCCAAGCTTGAGTC |
| 383 | E53Slu15 | AGAAGCTGAGCAGGTCTTAGGA |
| 384 | E53Slu16 | AAGGAAGAAGCTGAGCAGGTCT |
| 385 | E53Slu17 | GGAAGCTAAGGAAGAAGCTGAG |
| 386 | E53Slu18 | TTCAACACAATGGCTGGAAGCT |
| 387 | E53Slu19 | GTTAAAGGATTCAACACAATGG |
| 388 | E53Slu20 | AAATGTTAAAGGATTCAACACA |
| 389 | E53Slu21 | GCAACAGTTGAATGAAATGTTA |
| 390 | E53Slu22 | TACAAGAACACCTTCAGAACCG |
| 391 | E53Slu23 | AAGTACAAGAACACCTTCAGAA |
| 392 | E53Slu24 | AGTTGAAAGAATTCAGAATCAG |
| 393 | E53Slu25 | TAGTTGAAAGAATTCAGAATCA |

TABLE 4A
4. Exon 45 SluCas9 tgRNAs:

| Linker | | | Guide 1 | | | Guide 2 | | |
|---|---|---|---|---|---|---|---|---|
| Seq ID | | | Seq ID | | | Seq ID | | |
| No. | Linker | Linker Sequence | No. | Guide 1 | Guide 1 Sequence | No. | Guide 2 | Guide 2 Sequence |
| 104 | 50 nt | TCTATATGAGACCGACAATGCAGCT | 234 | E45SL8 | GCTGTCAGACAGAAAAAAGAGG | 249 | E45SL23 | GGTATCTTACAGGAACTCCAGG |
| | | GAGAACCCCACAATTAAGAATGACA | | | | | | |
| 105 | 100 nt | TACAATATGTAGGAGTGAGAGTGGT | 234 | E45SL8 | GCTGTCAGACAGAAAAAAGAGG | 249 | E45SL23 | GGTATCTTACAGGAACTCCAGG |
| | | AAGGACATCAGCGATTAGGACGATA | | | | | | |
| | | GGAATTCAGGTAACGGGCTTATACT | | | | | | |
| | | GTCTGGTCATGACGAGGTAAAGGTG | | | | | | |
| 106 | 200 nt | ATAACATGAAACATTACACAATACA | 234 | E45SL8 | GCTGTCAGACAGAAAAAAGAGG | 249 | E45SL23 | GGTATCTTACAGGAACTCCAGG |
| | | CAATCATAGGTTACCATGCTTACCA | | | | | | |
| | | CTCTGCTTAAACTGCCCTCTAATAC | | | | | | |
| | | CTTATCCTACTCAGCTTCAGACATC | | | | | | |
| | | GCACTCCACTCGCATAACAGTTACG | | | | | | |
| | | CTTCGACTCAGCGCATCAAGATAAC | | | | | | |
| | | TCTACCAACTTCGTATAGCAATATT | | | | | | |
| | | CAGGTCGTCGAATTCCCCACACGTA | | | | | | |
| 104 | 50 nt | TCTATATGAGACCGACAATGCAGCT | 249 | E45SL23 | GGTATCTTACAGGAACTCCAGG | 234 | E45SL8 | GCTGTCAGACAGAAAAAAGAGG |
| | | GAGAACCCCACAATTAAGAATGACA | | | | | | |
| 105 | 100 nt | TACAATATGTAGGAGTGAGAGTGGT | 249 | E45SL23 | GGTATCTTACAGGAACTCCAGG | 234 | E45SL8 | GCTGTCAGACAGAAAAAAGAGG |
| | | AAGGACATCAGCGATTAGGACGATA | | | | | | |
| | | GGAATTCAGGTAAGGGCATTATACT | | | | | | |
| | | GTCTGGTCATGACGAGGTAAAGGTG | | | | | | |
| 106 | 200 nt | ATAACATGAAACATTACACAATACA | 249 | E45SL23 | GGTATCTTACAGGAACTCCAGG | 234 | E45SL8 | GCTGTCAGACAGAAAAAAGAGG |
| | | CAATCATAGGTTACCATGCTTACCA | | | | | | |
| | | CTCTGCTTAAACTGCCCTCTAATAC | | | | | | |
| | | CTTATCCTACTCAGCTTCAGACATC | | | | | | |
| | | GCACTCCACTCGCATAACAGTTACG | | | | | | |
| | | CTTCGACTCAGCGCATCAAGATAAC | | | | | | |
| | | TCTACCAACTTCGTATAGCAATATT | | | | | | |
| | | CAGGTCGTCGAATTCCCCACACGTA | | | | | | |
| 104 | 50 nt | TCTATATGAGACCGACAATGCAGCT | 240 | E45SL14 | GCCAGTATTCTACAGGAAAAAT | 247 | E45SL21 | TACAGGAACTCCAGGATGGCAT |
| | | GAGAACCCCACAATTAAGAATGACA | | | | | | |
| 105 | 100 nt | TACAATATGTAGGAGTGAGAGTGGT | 240 | E45SL14 | GCCAGTATTCTACAGGAAAAAT | 247 | E45SL21 | TACAGGAACTCCAGGATGGCAT |
| | | AAGGACATCAGCGATTAGGACGATA | | | | | | |
| | | GGAATTCAGGTAACGGGCTTATACT | | | | | | |
| | | GTCTGGTCATGACGAGGTAAAGGTG | | | | | | |
| 106 | 200 nt | ATAACATGAAACATTACACAATACA | 240 | E45SL14 | GCCAGTATTCTACAGGAAAAAT | 247 | E45SL21 | TACAGGAACTCCAGGATGGCAT |
| | | CAATCATAGGTTACCATGCTTACCA | | | | | | |
| | | CTCTGCTTAAACTGCCCTCTAATAC | | | | | | |
| | | CTTATCCTACTCAGCTTCAGACATC | | | | | | |
| | | GCACTCCACTCGCATAACAGTTACG | | | | | | |
| | | CTTCGACTCAGCGCATCAAGATAAC | | | | | | |
| | | TCTACCAACTTCGTATAGCAATATT | | | | | | |
| | | CAGGTCGTCGAATTCCCCACACGTA | | | | | | |
| 104 | 50 nt | TCTATATGAGACCGACAATGCAGCT | 247 | E45SL21 | TACAGGAACTCCAGGATGGCAT | 240 | E45SL14 | GCCAGTATTCTACAGGAAAAAT |
| | | GAGAACCCCACAATTAAGAATGACA | | | | | | |
| 105 | 100 nt | TACAATATGTAGGAGTGAGAGTGGT | 247 | E45SL21 | TACAGGAACTCCAGGATGGCAT | 240 | E45SL14 | GCCAGTATTCTACAGGAAAAAT |
| | | AAGGACATCAGCGATTAGGACGATA | | | | | | |
| | | GGAATTCAGGTAACGGGCTTATACT | | | | | | |
| | | GTCTGGTCATGACGAGGTAAAGGTG | | | | | | |
| 106 | 200 nt | ATAACATGAAACATTACACAATACA | 247 | E45SL21 | TACAGGAACTCCAGGATGGCAT | 240 | E45SL14 | GCCAGTATTCTACAGGAAAAAT |
| | | CAATCATAGGTTACCATGCTTACCA | | | | | | |
| | | CTCTGCTTAAACTGCCCTCTAATAC | | | | | | |
| | | CTTATCCTACTCAGCTTCAGACATC | | | | | | |
| | | GCACTCCACTCGCATAACAGTTACG | | | | | | |
| | | CTTCGACTCAGCGCATCAAGATAAC | | | | | | |
| | | TCTACCAACTTCGTATAGCAATATT | | | | | | |
| | | CAGGTCGTCGAATTCCCCACACGTA | | | | | | |
| 104 | 50 nt | TCTATATGAGACCGACAATGCAGCT | 245 | E45SL19 | GTTGTCAGAACATTGAATGCAA | 247 | E45SL21 | TACAGGAACTCCAGGATGGCAT |
| | | GAGAACCCCACAATTAAGAATGACA | | | | | | |
| 105 | 100 nt | TACAATATGTAGGAGTGAGAGTGGT | 245 | E45SL19 | GTTGTCAGAACATTGAATGCAA | 247 | E45SL21 | TACAGGAACTCCAGGATGGCAT |
| | | AAGGACATCAGCGATTAGGACGATA | | | | | | |
| | | GGAATTCAGGTAACGGGCTTATACT | | | | | | |
| | | GTCTGGTCATGACGAGGTAAAGGTG | | | | | | |
| 106 | 200 nt | ATAACATGAAACATTACACAATACA | 245 | E45SL19 | GTTGTCAGAACATTGAATGCAA | 247 | E45SL21 | TACAGGAACTCCAGGATGGCAT |
| | | CAATCATAGGTTACCATGCTTACCA | | | | | | |
| | | CTCTGCTTAAACTGCCCTCTAATAC | | | | | | |
| | | CTTATCCTACTCAGCTTCAGACATC | | | | | | |
| | | GCACTCCACTCGCATAACAGTTACG | | | | | | |
| | | CTTCGACTCAGCGCATCAAGATAAC | | | | | | |
| | | TCTACCAACTTCGTATAGCAATATT | | | | | | |
| | | CAGGTCGTCGAATTCCCCACACGTA | | | | | | |
| 104 | 50 nt | TCTATATGAGACCGACAATGCAGCT | 247 | E45SL21 | TACAGGAACTCCAGGATGGCAT | 245 | E45SL19 | GTTGTCAGAACATTGAATGCAA |
| | | GAGAACCCCACAATTAAGAATGACA | | | | | | |
| 105 | 100 nt | TACAATATGTAGGAGTGAGAGTGGT | 247 | E45SL21 | TACAGGAACTCCAGGATGGCAT | 245 | E45SL19 | GTTGTCAGAACATTGAATGCAA |
| | | AAGGACATCAGCGATTAGGACGATA | | | | | | |
| | | GGAATTCAGGTAACGGGCTTATACT | | | | | | |
| | | GTCTGGTCATGACGAGGTAAAGGTG | | | | | | |
| 106 | 200 nt | ATAACATGAAACATTACACAATACA | 247 | E45SL21 | TACAGGAACTCCAGGATGGCAT | 245 | E45SL19 | GTTGTCAGAACATTGAATGCAA |
| | | CAATCATAGGTTACCATGCTTACCA | | | | | | |
| | | CTCTGCTTAAACTGCCCTCTAATAC | | | | | | |
| | | CTTATCCTACTCAGCTTCAGACATC | | | | | | |
| | | GCACTCCACTCGCATAACAGTTACG | | | | | | |
| | | CTTCGACTCAGCGCATCAAGATAAC | | | | | | |
| | | TCTACCAACTTCGTATAGCAATATT | | | | | | |
| | | CAGGTCGTCGAATTCCCCACACGTA | | | | | | |

TABLE 4B
5. Exon 53 SluCas9 tgRNAs:

| Linker | | | Guide 1 | | | Guide 2 | | |
|---|---|---|---|---|---|---|---|---|
| Seq ID | | | Seq ID | | | Seq ID | | |
| No. | Linker | Linker Sequence | No. | Guide 1 | Guide 1 Sequence | No. | Guide 2 | Guide 2 Sequence |
| N/A | N/A | (No linker) | 384 | E53SL16 | AAGGAAGAAGCTGAGCAG | 391 | E53SL23 | AAGTACAAGAACACCTTCA |
| | | | | | GTCT | | | GAA |
| 104 | 50 | TCTATATGAGACCGACAATG | 384 | E53SL16 | AAGGAAGAAGCTGAGCAG | 391 | E53SL23 | AAGTACAAGAACACCTTCA |
| | | CAGCTGAGAACCCCACAATT | | | GTCT | | | GAA |
| | | AAGAATGACA | | | | | | |
| 103 | 40 | TCTATATGAGACCGACAATGCC | 384 | E53SL16 | AAGGAAGAAGCTGAGCAG | 391 | E53SL23 | AAGTACAAGAACACCTTCA |
| | | CCACAATTAAGAATGACA | | | GTCT | | | GAA |
| 102 | 30 | TCTATATGAGACCGACAATTAA | 384 | E53SL16 | AAGGAAGAAGCTGAGCAG | 391 | E53SL23 | AAGTACAAGAACACCTTCA |
| | | GAATGACA | | | GTCT | | | GAA |
| 101 | 20 | TCTATATGAGAAGAATGACA | 384 | E53SL16 | AAGGAAGAAGCTGAGCAG | 391 | E53SL23 | AAGTACAAGAACACCTTCA |
| | | | | | GTCT | | | GAA |
| 100 | 10 | TCTATTGACA | 384 | E53SL16 | AAGGAAGAAGCTGAGCAG | 391 | E53SL23 | AAGTACAAGAACACCTTCA |
| | | | | | GTCT | | | GAA |
| N/A | N/A | (No linker) | 376 | E53SL7 | ACATTTCATTCAACTGTT | 372 | E53SL3 | CTTTTGGATTGCATCTACT |
| | | | | | GCCT | | | GTA |
| 104 | 50 | TCTATATGAGACCGACAATG | 376 | E53SL7 | ACATTTCATTCAACTGTT | 372 | E53SL3 | CTTTTGGATTGCATCTACT |
| | | CAGCTGAGAACCCCACAATT | | | GCCT | | | GTA |
| | | AAGAATGACA | | | | | | |
| 103 | 40 | TCTATATGAGACCGACAATGCC | 376 | E53SL7 | ACATTTCATTCAACTGTT | 372 | E53SL3 | CTTTTGGATTGCATCTACT |
| | | CCACAATTAAGAATGACA | | | GCCT | | | GTA |
| 102 | 30 | TCTATATGAGACCGACAATTAA | 376 | E53SL7 | ACATTTCATTCAACTGTT | 372 | E53SL3 | CTTTTGGATTGCATCTACT |
| | | GAATGACA | | | GCCT | | | GTA |
| 101 | 20 | TCTATATGAGAAGAATGACA | 376 | E53SL7 | ACATTTCATTCAACTGTT | 372 | E53SL3 | CTTTTGGATTGCATCTACT |
| | | | | | GCCT | | | GTA |
| 100 | 10 | TCTATTGACA | 376 | E53SL7 | ACATTTCATTCAACTGTT | 372 | E53SL3 | CTTTTGGATTGCATCTACT |
| | | | | | GCCT | | | GTA |

TABLE 5
6. Exemplary tgRNA sequences used in the Examples provided herein:

| tgRNA | |
|---|---|
| Seq ID No. | tgRNA Sequence |
| 121 | GCTGTCAGACAGAAAAAAGAGGgtttaagtactctgtgctggaaacagcacagaatctactgaaacaagacaatatgtcgtgtttatcccatcaatttattggtggg |
| | aTctATaTGaGaCCGACAAtGCAGcTGaGAACCCCACaATTAAGAATGaCaGGTATCTTACAGGAACTCCAGGgtttaagtactctgtgctggaaacagcacagaat |
| | ctactgaaacaagacaatatgtcgtgtttatcccatcaatttattggtgggattttttt |
| 122 | GCTGTCAGACAGAAAAAAGAGGgtttaagtactctgtgctggaaacagcacagaatctactgaaacaagacaatatgtcgtgtttatcccatcaatttattggtggg |
| | aTaCAATATgtaGGAGTGAGAGTGgTAaGGaCAtCAGcGaTTAGGACGAtaGGAaTTCAGGTaACggGCTTATACTGTCTGGTCATGACGAGGTAAAGgTgGGTATC |
| | TTACAGGAACTCCAGGgtttaagtactctgtgctggaaacagcacagaatctactgaaacaagacaatatgtcgtgtttatcccatcaatttattggtgggattttt |
| | tt |
| 123 | GCTGTCAGACAGAAAAAAGAGGgtttaagtactctgtgctggaaacagcacagaatctactgaaacaagacaatatgtcgtgtttatcccatcaatttattggtggg |
| | aAtAACaTGAAACATTacACAATACACAATCaTAGGTTaCcATGCTTACCACTCTGCTTAAAcTgcccTCTaaTaCcTTATcCTACTCaGcTTCaGACATCGCACtC |
| | CACtCGCATAAcAGTTacGCTTCGACTCAGCGCATCAAGATAACtcTACCAACTTCGTATAGCAATATTCaGGTcgTCGaaTTCCCCAcaCGTAGGTATCTTACAGG |
| | AACTCCAGGgtttaagtactctgtgctggaaacagcacagaatctactgaaacaagacaatatgtcgtgtttatcccatcaatttattggtgggattttttt |
| 124 | GGTATCTTACAGGAACTCCAGGgtttaagtactctgtgctggaaacagcacagaatctactgaaacaagacaatatgtcgtgtttatcccatcaatttattggtggg |
| | aTctATaTGaGaCCGACAAtGCAGcTGaGAACCCCACaATTAAGAATGaCaGCTGTCAGACAGAAAAAAGAGGgtttaagtactctgtgctggaaacagcacagaat |
| | ctactgaaacaagacaatatgtcgtgtttatcccatcaatttattggtgggattttttt |
| 125 | GGTATCTTACAGGAACTCCAGGgtttaagtactctgtgctggaaacagcacagaatctactgaaacaagacaatatgtcgtgtttatcccatcaatttattggtggg |
| | aTaCAATATgtaGGAGTGAGAGTGgTAaGGaCAtCAGcGaTTAGGACGAtaGGAaTTCAGGTaACggGCTTATACTGTcTGGTCATGACGAGGTAAAGgTgGCTGTC |
| | AGACAGAAAAAAGAGGgtttaagtactctgtgctggaaacagcacagaatctactgaaacaagacaatatgtcgtgtttatcccatcaatttattggtgggattttt |
| | tt |
| 126 | GGTATCTTACAGGAACTCCAGGgtttaagtactctgtgctggaaacagcacagaatctactgaaacaagacaatatgtcgtgtttatcccatcaatttattggtggg |
| | aAtAACaTGAAACATTacACAATACACAATCaTAGGTTaCcATGCTTACCACTCTGCTTAAAcTgcccTCTaaTaCcTTATcCTACTCaGcTTCaGACATCGCACtC |
| | CACtCGCATAAcAGTTacGCTTCGACTCAGCGCATCAAGATAACtcTACCAACTTCGTATAGCAATATTCaGGTcgTCGaaTTCCCCAcaCGTAGCTGTCAGACAGA |
| | AAAAAGAGGgtttaagtactctgtgctggaaacagcacagaatctactgaaacaagacaatatgtcgtgtttatcccatcaatttattggtgggattttttt |
| 127 | GCCAGTATTCTACAGGAAAAATgtttaagtactctgtgctggaaacagcacagaatctactgaaacaagacaatatgtcgtgtttatcccatcaatttattggtggg |
| | aTctATaTGaGaCCGACAAtGCAGcTGaGAACCCCACaATTAAGAATGaCaTACAGGAACTCCAGGATGGCATgtttaagtactctgtgctggaaacagcacagaat |
| | ctactgaaacaagacaatatgtcgtgtttatcccatcaatttattggtgggattttttt |
| 128 | GCCAGTATTCTACAGGAAAAATgtttaagtactctgtgctggaaacagcacagaatctactgaaacaagacaatatgtcgtgtttatcccatcaatttattggtggg |
| | aTaCAATATgtaGGAGTGAGAGTGgTAaGGaCAtCAGcGaTTAGGACGAtaGGAaTTCAGGTaACggGCTTATACTGTcTGGTCATGACGAGGTAAAGgTgTACAGG |
| | AACTCCAGGATGGCATgtttaagtactctgtgctggaaacagcacagaatctactgaaacaagacaatatgtcgtgtttatcccatcaatttattggtgggattttt |
| | tt |
| 129 | GCCAGTATTCTACAGGAAAAATgtttaagtactctgtgctggaaacagcacagaatctactgaaacaagacaatatgtcgtgtttatcccatcaatttattggtggg |
| | aAtAACaTGAAACATTacACAATACACAATCaTAGGTTaCcATGCTTACCACTCTGCTTAAAcTgcccTCTaaTaCcTTATcCTACTCaGcTTCaGACATCGCACtC |
| | CACtCGCATAAcAGTTacGCTTCGACTCAGCGCATCAAGATAACtcTACCAACTTCGTATAGCAATATTCaGGTcgTCGaaTTCCCCAcaCGTATACAGGAACTCCA |
| | GGATGGCATgtttaagtactctgtgctggaaacagcacagaatctactgaaacaagacaatatgtcgtgtttatcccatcaatttattggtgggattttttt |
| 130 | TACAGGAACTCCAGGATGGCATgtttaagtactctgtgctggaaacagcacagaatctactgaaacaagacaatatgtcgtgtttatcccatcaatttattggtggg |
| | aTctATaTGaGaCCGACAAtGCAGcTGaGAACCCCACaATTAAGAATGaCaGCCAGTATTCTACAGGAAAAATgtttaagtactctgtgctggaaacagcacagaat |
| | ctactgaaacaagacaatatgtcgtgtttatcccatcaatttattggtgggattttttt |
| 131 | TACAGGAACTCCAGGATGGCATgtttaagtactctgtgctggaaacagcacagaatctactgaaacaagacaatatgtcgtgtttatcccatcaatttattggtggg |
| | aTaCAATATgtaGGAGTGAGAGTGgTAaGGaCAtCAGcGaTTAGGACGAtaGGAaTTCAGGTaACggGCTTATACTGTcTGGTCATGACGAGGTAAAGgTgGCCAGT |
| | ATTCTACAGGAAAAATgtttaagtactctgtgctggaaacagcacagaatctactgaaacaagacaatatgtcgtgtttatcccatcaatttattggtgggattttt |
| | tt |
| 132 | TACAGGAACTCCAGGATGGCATgtttaagtactctgtgctggaaacagcacagaatctactgaaacaagacaatatgtcgtgtttatcccatcaatttattggtggg |
| | aAtAACaTGAAACATTacACAATACACAATCaTAGGTTaCcATGCTTACCACTCTGCTTAAAcTgcccTCTaaTaCcTTATcCTACTCaGcTTCaGACATCGCACtC |
| | CACtCGCATAAcAGTTacGCTTCGACTCAGCGCATCAAGATAACtcTACCAACTTCGTATAGCAATATTCaGGTcgTCGaaTTCCCCAcaCGTAGCCAGTATTCTAC |
| | AGGAAAAATgtttaagtactctgtgctggaaacagcacagaatctactgaaacaagacaatatgtcgtgtttatcccatcaatttattggtgggattttttt |
| 133 | GTTGTCAGAACATTGAATGCAAgtttaagtactctgtgctggaaacagcacagaatctactgaaacaagacaatatgtcgtgtttatcccatcaatttattggtggg |
| | aTctATaTGaGaCCGACAAtGCAGcTGaGAACCCCACaATTAAGAATGaCaTACAGGAACTCCAGGATGGCATgtttaagtactctgtgctggaaacagcacagaat |
| | ctactgaaacaagacaatatgtcgtgtttatcccatcaatttattggtgggattttttt |
| 134 | GTTGTCAGAACATTGAATGCAAgtttaagtactctgtgctggaaacagcacagaatctactgaaacaagacaatatgtcgtgtttatcccatcaatttattggtggg |
| | aTaCAATATgtaGGAGTGAGAGTGgTAaGGaCAtCAGcGaTTAGGACGAtaGGAaTTCAGGTaACggGCTTATACTGTCTGGTCATGACGAGGTAAAGgTgTACAGG |
| | AACTCCAGGATGGCATgtttaagtactctgtgctggaaacagcacagaatctactgaaacaagacaatatgtcgtgtttatcccatcaatttattggtgggattttt |
| | tt |
| 135 | GTTGTCAGAACATTGAATGCAAgtttaagtactctgtgctggaaacagcacagaatctactgaaacaagacaatatgtcgtgtttatcccatcaatttattggtggg |
| | aAtAACaTGAAACATTacACAATACACAATCaTAGGTTaCcATGCTTACCACTCTGCTTAAAcTgcccTCTaaTaCcTTATcCTACTCaGcTTCaGACATCGCACtC |
| | CACtCGCATAAcAGTTacGCTTCGACTCAGCGCATCAAGATAACtcTACCAACTTCGTATAGCAATATTCaGGTcgTCGaaTTCCCCAcaCGTATACAGGAACTCCA |
| | GGATGGCATgtttaagtactctgtgctggaaacagcacagaatctactgaaacaagacaatatgtcgtgtttatcccatcaatttattggtgggattttttt |
| 136 | TACAGGAACTCCAGGATGGCATgtttaagtactctgtgctggaaacagcacagaatctactgaaacaagacaatatgtcgtgtttatcccatcaatttattggtggg |
| | aTctATaTGaGaCCGACAAtGCAGcTGaGAACCCCACaATTAAGAATGaCaGTTGTCAGAACATTGAATGCAAgtttaagtactctgtgctggaaacagcacagaat |
| | ctactgaaacaagacaatatgtcgtgtttatcccatcaatttattggtgggattttttt |
| 137 | TACAGGAACTCCAGGATGGCATgtttaagtactctgtgctggaaacagcacagaatctactgaaacaagacaatatgtcgtgtttatcccatcaatttattggtggg |
| | aTaCAATATgtaGGAGTGAGAGTGgTAaGGaCAtCAGcGaTTAGGACGAtaGGAaTTCAGGTaACggGCTTATACTGTcTGGTCATGACGAGGTAAAGgTgGTTGTC |
| | AGAACATTGAATGCAAgtttaagtactctgtgctggaaacagcacagaatctactgaaacaagacaatatgtcgtgtttatcccatcaatttattggtgggattttt |
| | tt |
| 138 | TACAGGAACTCCAGGATGGCATgtttaagtactctgtgctggaaacagcacagaatctactgaaacaagacaatatgtcgtgtttatcccatcaatttattggtggg |
| | aAtAACaTGAAACATTacACAATACACAATCaTAGGTTaCcATGCTTACCACTCTGCTTAAAcTgcccTCTaaTaCcTTATcCTACTCaGcTTCaGACATCGCACtC |
| | CACtCGCATAAcAGTTacGCTTCGACTCAGCGCATCAAGATAACtcTACCAACTTCGTATAGCAATATTCaGGTcgTCGaaTTCCCCAcaCGTAGTTGTCAGAACAT |
| | TGAATGCAAgtttaagtactctgtgctggaaacagcacagaatctactgaaacaagacaatatgtcgtgtttatcccatcaatttattggtgggattttttt |
| 139 | AAGGAAGAAGCTGAGCAGGTCTgtttaagtactctgtgctggaaacagcacagaatctactgaaacaagacaatatgtcgtgtttatcccatcaatttattggtggg |
| | aTctATaTGaGaCCGACAAtGCAGcTGaGAACCCCACaATTAAGAATGaCaAAGTACAAGAACACCTTCAGAAgtttaagtactctgtgctggaaacagcacagaat |
| | ctactgaaacaagacaatatgtcgtgtttatcccatcaatttattggtgggattttttt |
| 140 | AAGGAAGAAGCTGAGCAGGTCTgtttaagtactctgtgctggaaacagcacagaatctactgaaacaagacaatatgtcgtgtttatcccatcaatttattggtggg |
| | aTctATaTGaGaCCGACAAtGCCCCACaATTAAGAATGaCaAAGTACAAGAACACCTTCAGAAgtttaagtactctgtgctggaaacagcacagaatctactgaaac |
| | aagacaatatgtcgtgtttatcccatcaatttattggtgggattttttt |
| 141 | AAGGAAGAAGCTGAGCAGGTCTgtttaagtactctgtgctggaaacagcacagaatctactgaaacaagacaatatgtcgtgtttatcccatcaatttattggtggg |
| | aTctATaTGaGaCCGACaATTAAGAATGaCaAAGTACAAGAACACCTTCAGAAgtttaagtactctgtgctggaaacagcacagaatctactgaaacaagacaatat |
| | gtcgtgtttatcccatcaatttattggtgggattttttt |
| 142 | AAGGAAGAAGCTGAGCAGGTCTgtttaagtactctgtgctggaaacagcacagaatctactgaaacaagacaatatgtcgtgtttatcccatcaatttattggtggg |
| | aTctATaTGaGAAGAATGaCaAAGTACAAGAACACCTTCAGAAgtttaagtactctgtgctggaaacagcacagaatctactgaaacaagacaatatgtcgtgttta |
| | tcccatcaatttattggtgggattttttt |
| 143 | AAGGAAGAAGCTGAGCAGGTCTgtttaagtactctgtgctggaaacagcacagaatctactgaaacaagacaatatgtcgtgtttatcccatcaatttattggtggg |
| | aTctATTGaCaAAGTACAAGAACACCTTCAGAAgtttaagtactctgtgctggaaacagcacagaatctactgaaacaagacaatatgtcgtgtttatcccatcaat |
| | ttattggtgggattttttt |
| 144 | AAGGAAGAAGCTGAGCAGGTCTgtttaagtactctgtgctggaaacagcacagaatctactgaaacaagacaatatgtcgtgtttatcccatcaatttattggtggg |
| | aAAGTACAAGAACACCTTCAGAAgtttaagtactctgtgctggaaacagcacagaatctactgaaacaagacaatatgtcgtgtttatcccatcaatttattggtgg |
| | gattttttt |
| 145 | ACATTTCATTCAACTGTTGCCTgtttaagtactctgtgctggaaacagcacagaatctactgaaacaagacaatatgtcgtgtttatcccatcaatttattggtggg |
| | aTctATaTGaGaCCGACAAtGCAGcTGaGAACCCCACaATTAAGAATGaCaCTTTTGGATTGCATCTACTGTAgtttaagtactctgtgctggaaacagcacagaat |
| | ctactgaaacaagacaatatgtcgtgtttatcccatcaatttattggtgggattttttt |
| 146 | ACATTTCATTCAACTGTTGCCTgtttaagtactctgtgctggaaacagcacagaatctactgaaacaagacaatatgtcgtgtttatcccatcaatttattggtggg |
| | aTctATaTGaGaCCGACAAtGCCCCACaATTAAGAATGaCaCTTTTGGATTGCATCTACTGTAgtttaagtactctgtgctggaaacagcacagaatctactgaaac |
| | aagacaatatgtcgtgtttatcccatcaatttattggtgggattttttt |
| 147 | ACATTTCATTCAACTGTTGCCTgtttaagtactctgtgctggaaacagcacagaatctactgaaacaagacaatatgtcgtgtttatcccatcaatttattggtggg |
| | aTctATaTGaGaCCGACaATTAAGAATGaCaCTTTTGGATTGCATCTACTGTAgtttaagtactctgtgctggaaacagcacagaatctactgaaacaagacaatat |
| | gtcgtgtttatcccatcaatttattggtgggattttttt |
| 148 | ACATTTCATTCAACTGTTGCCTgtttaagtactctgtgctggaaacagcacagaatctactgaaacaagacaatatgtcgtgtttatcccatcaatttattggtggg |
| | aTctATaTGaGAAGAATGaCaCTTTTGGATTGCATCTACTGTAgtttaagtactctgtgctggaaacagcacagaatctactgaaacaagacaatatgtcgtgttta |
| | tcccatcaatttattggtgggattttttt |
| 149 | ACATTTCATTCAACTGTTGCCTgtttaagtactctgtgctggaaacagcacagaatctactgaaacaagacaatatgtcgtgtttatcccatcaatttattggtggg |
| | aTctATTGaCaCTTTTGGATTGCATCTACTGTAgtttaagtactctgtgctggaaacagcacagaatctactgaaacaagacaatatgtcgtgtttatcccatcaat |
| | ttattggtgggattttttt |
| 150 | ACATTTCATTCAACTGTTGCCTgtttaagtactctgtgctggaaacagcacagaatctactgaaacaagacaatatgtcgtgtttatcccatcaatttattggtggg |
| | aCTTTTGGATTGCATCTACTGTAgtttaagtactctgtgctggaaacagcacagaatctactgaaacaagacaatatgtcgtgtttatcccatcaatttattggtgg |
| | gattttttt |
| 151 | qAAGGAAGAAGCTGAGCAGGTCTgtttaagtactctgtgctggaaacagcacagaatctactgaaacaagacaatatgtcgtgtttatcccatcaatttattggtgg |
| | gaTctATaTGaGAAGAATGaCaAAGTACAAGAACACCTTCAGAAgtttaagtactctgtgctggaaacagcacagaatctactgaaacaagacaatatgtcgtgttt |
| | atcccatcaatttattggtgggattttttt |
| 152 | gAAGGAAGAAGCTGAGCAGGTCTgtttaagtactctgtgctggaaacagcacagaatctactgaaacaagacaatatgtcgtgtttatcccatcaatttattggtgg |
| | gaAAGAATGaCaTctATaTGaGAAGTACAAGAACACCTTCAGAAgtttaagtactctgtgctggaaacagcacagaatctactgaaacaagacaatatgtcgtgttt |
| | atcccatcaatttattggtgggattttttt |
| 153 | gAAGGAAGAAGCTGAGCAGGTCTgtttaagtactctgtgctggaaacagcacagaatctactgaaacaagacaatatgtcgtgtttatcccatcaatttattggtgg |
| | gaGatACaTagAACATTcaACcAAGTACAAGAACACCTTCAGAAgtttaagtactctgtgctggaaacagcacagaatctactgaaacaagacaatatgtcgtgttt |
| | atcccatcaatttattggtgggattttttt |
| 154 | gAAGGAAGAAGCTGAGCAGGTCTgtttaagtactctgtgctggaaacagcacagaatctactgaaacaagacaatatgtcgtgtttatcccatcaatttattggtgg |
| | gaCGACTCAGCGCATCAAGATAAGTACAAGAACACCTTCAGAAgtttaagtactctgtgctggaaacagcacagaatctactgaaacaagacaatatgtcgtgttt |
| | atcccatcaatttattggtgggattttttt |
| 155 | gAAGGAAGAAGCTGAGCAGGTCTgtttaagtactctgtgctggaaacagcacagaatctactgaaacaagacaatatgtcgtgtttatcccatcaatttattggtgg |
| | gaTctATaTGaGGGGtCtCtCtAGttAGACCAGAtttGAGCCtGGGGGCtCtCtGGCtAGCtGGGGAACCCACAAGAATGaCaAAGTACAAGAACACCTTCAGAAgt |
| | ttaagtactctgtgctggaaacagcacagaatctactgaaacaagacaatatgtcgtgtttatcccatcaatttattggtgggattttttt |
| 156 | gAAGGAAGAAGCTGAGCAGGTCTgtttaagtactctgtgctggaaacagcacagaatctactgaaacaagacaatatgtcgtgtttatcccatcaatttattggtgg |
| | gaTctATaTGaGGGAAttGCGGGAAAGGGGtCAACAGCCGttCAGtACCAAGtCtCAGGGGAAACtttGAGAtGGCCttGCAAAGGGtAtGGtAAtAAGCtGACGGA |
| | CAtGGtCCtAACCACGCAGCCAAGtCCtAAGtCAACAGAtCttCtGttGAtAtGGAtGCAGttCAAGAATGaCaAAGTACAAGAACACCTTCAGAAgtttaagtact |
| | ctgtgctggaaacagcacagaatctactgaaacaagacaatatgtcgtgtttatcccatcaatttattggtgggattttttt |
| 157 | gAAGGAAGAAGCTGAGCAGGTCTgtttaagtactctgtgctggaaacagcacagaatctactgaaacaagacaatatgtcgtgtttatcccatcaatttattggtgg |
| | gaTctATaTGaGAAGAATGaTGAAGTACAAGAACACCTTCAGAAgtttaagtactctgtgctggaaacagcacagaatctactgaaacaagacaatatgtcgtgttt |
| | atcccatcaatttattggtgggattttttt |
| 158 | qAAGGAAGAAGCTGAGCAGGTCTgtttaagtactctgtgctggaaacagcacagaatctactgaaacaagacaatatgtcgtgtttatcccatcaatttattggtgg |
| | gaTctATaTGaGAAGAATagTGAAGTACAAGAACACCTTCAGAAgtttaagtactctgtgctggaaacagcacagaatctactgaaacaagacaatatgtcgtgttt |
| | atcccatcaatttattggtgggattttttt |
| 159 | gAAGGAAGAAGCTGAGCAGGTCTgtttaagtactctgtgctggaaacagcacagaatctactgaaacaagacaatatgtcgtgtttatcccatcaatttattggtgg |
| | gaTATATATGAGAATAATTACAAAGTACAAGAACACCTTCAGAAgtttaagtactctgtgctggaaacagcacagaatctactgaaacaagacaatatgtcgtgttt |
| | atcccatcaatttattggtgggattttttt |
| 160 | gAAGGAAGAAGCTGAGCAGGTCTgtttaagtactctgtgctggaaacagcacagaatctactgaaacaagacaatatgtcgtgtttatcccatcaatttattggtgg |
| | gaTATATATTATAATAATTATAAAGTACAAGAACACCTTCAGAAgtttaagtactctgtgctggaaacagcacagaatctactgaaacaagacaatatgtcgtgttt |
| | atcccatcaatttattggtgggattttttt |
| 161 | GAAGGAAGAAGCTGAGCAGGTCTGTTTCAGTACTCTGGAAACAGAATCTACTGAAACAAGACAATATGTCGTGTTTATCCCATCAATTTATTGGTGGGATTctATaT |
| | GaGAAGAATGaCaAAGTACAAGAACACCTTCAGAAGTTTCAGTACTCTGGAAACAGAATCTACTGAAACAAGACAATATGTCGTGTTTATCCCATCAATTTATTGGT |
| | GGGATttttttt |
| 162 | gACATTTCATTCAACTGTTGCCTgtttaagtactctgtgctggaaacagcacagaatctactgaaacaagacaatatgtcgtgtttatcccatcaatttattggtgg |
| | gaTctATaTGaGAAGAATGaCaAGGCCAGAGCCAAGCTTGAGTCgtttaagtactctgtgctggaaacagcacagaatctactgaaacaagacaatatgtcgtgttt |
| | atcccatcaatttattggtgggattttttt |
| 163 | GACATTTCATTCAACTGTTGCCTgtttaagtactctgtgctggaaacagcacagaatctactgaaacaagacaatatgtcgtgtttatcccatcaatttattggtgg |
| | gaTctATaTGaGaCCGACAAtGCAGcTGaGAACCCCACaATTAAGAATGaCaAGGCCAGAGCCAAGCTTGAGTCgtttaagtactctgtgctggaaacagcacagaa |
| | tctactgaaacaagacaatatgtcgtgtttatcccatcaatttattggtgggattttttt |
| 164 | GACATTTCATTCAACTGTTGCCTgtttaagtactctgtgctggaaacagcacagaatctactgaaacaagacaatatgtcgtgtttatcccatcaatttattggtgg |
| | gaTaCAATATgtaGGAGTGAGAGTGgTAaGGaCAtCAGcGaTTAGGACGAtaGGAaTTCAGGTaACggGCTTATACTGTcTGGTCATGACGAGGTAAAGgTgAGGCC |
| | AGAGCCAAGCTTGAGTCgtttaagtactctgtgctggaaacagcacagaatctactgaaacaagacaatatgtcgtgtttatcccatcaatttattgggggatttt |
| | ttt |
| 165 | gAGGCCAGAGCCAAGCTTGAGTCgtttaagtactctgtgctggaaacagcacagaatctactgaaacaagacaatatgtcgtgtttatcccatcaatttattggtgg |
| | gaTctATaTGaGAAGAATGaCaACATTTCATTCAACTGTTGCCTgtttaagtactctgtgctggaaacagcacagaatctactgaaacaagacaatatgtcgtgttt |
| | atcccatcaatttattggtgggattttttt |
| 166 | GAGGCCAGAGCCAAGCTTGAGTCgtttaagtactctgtgctggaaacagcacagaatctactgaaacaagacaatatgtcgtgtttatcccatcaatttattggtgg |
| | gaTctATaTGaGaCCGACAAtGCAGcTGaGAACCCCACaATTAAGAATGaCaACATTTCATTCAACTGTTGCCTgtttaagtactctgtgctggaaacagcacagaa |
| | tctactgaaacaagacaatatgtcgtgtttatcccatcaatttattggtgggattttttt |
| 167 | GAGGCCAGAGCCAAGCTTGAGTCgtttaagtactctgtgctggaaacagcacagaatctactgaaacaagacaatatgtcgtgtttatcccatcaatttattggtgg |
| | gaTaCAATATgtaGGAGTGAGAGTGgTAaGGaCAtCAGcGaTTAGGACGAtaGGAaTTCAGGTaACggGCTTATACTGTCTGGTCATGACGAGGTAAAGgTgACATT |
| | TCATTCAACTGTTGCCTgtttaagtactctgtgctggaaacagcacagaatctactgaaacaagacaatatgtcgtgtttatcccatcaatttattggtgggatttt |
| | ttt |
| 168 | GACCCTCCTTCCATGACTCAAGCgtttaagtactctgtgctggaaacagcacagaatctactgaaacaagacaatatgtcgtgtttatcccatcaatttattggtgg |
| | gaTctATaTGaGAAGAATGaCaAAGTACAAGAACACCTTCAGAAgtttaagtactctgtgctggaaacagcacagaatctactgaaacaagacaatatgtcgtgttt |
| | atcccatcaatttattggtgggattttttt |
| 169 | GACCCTCCTTCCATGACTCAAGCgtttaagtactctgtgctggaaacagcacagaatctactgaaacaagacaatatgtcgtgtttatcccatcaatttattggtgg |
| | gaTctATaTGaGaCCGACAAtGCAGcTGaGAACCCCACaATTAAGAATGaCaAAGTACAAGAACACCTTCAGAAgtttaagtactctgtgctggaaacagcacagaa |
| | tctactgaaacaagacaatatgtcgtgtttatcccatcaatttattggtgggattttttt |
| 170 | GACCCTCCTTCCATGACTCAAGCgtttaagtactctgtgctggaaacagcacagaatctactgaaacaagacaatatgtcgtgtttatcccatcaatttattggtgg |
| | gaTaCAATATgtaGGAGTGAGAGTGgTAaGGaCAtCAGcGaTTAGGACGAtaGGAaTTCAGGTaACggGCTTATACTGTcTGGTCATGACGAGGTAAAGgTgAAGTA |
| | CAAGAACACCTTCAGAAgtttaagtactctgtgctggaaacagcacagaatctactgaaacaagacaatatgtcgtgtttatcccatcaatttattggtgggatttt |
| | ttt |
| 171 | GAAGTACAAGAACACCTTCAGAAgtttaagtactctgtgctggaaacagcacagaatctactgaaacaagacaatatgtcgtgtttatcccatcaatttattggtgg |
| | gaTctATaTGaGAAGAATGaCaACCCTCCTTCCATGACTCAAGCgtttaagtactctgtgctggaaacagcacagaatctactgaaacaagacaatatgtcgtgttt |
| | atcccatcaatttattggtgggattttttt |
| 172 | GAAGTACAAGAACACCTTCAGAAgtttaagtactctgtgctggaaacagcacagaatctactgaaacaagacaatatgtcgtgtttatcccatcaatttattggtgg |
| | gaTctATaTGaGaCCGACAAtGCAGcTGaGAACCCCACaATTAAGAATGaCaACCCTCCTTCCATGACTCAAGCgtttaagtactctgtgctggaaacagcacagaa |
| | tctactgaaacaagacaatatgtcgtgtttatcccatcaatttattggtgggattttttt |
| 173 | GAAGTACAAGAACACCTTCAGAAgtttaagtactctgtgctggaaacagcacagaatctactgaaacaagacaatatgtcgtgtttatcccatcaatttattggtgg |
| | gaTaCAATATgtaGGAGTGAGAGTGgTAaGGaCAtCAGcGaTTAGGACGAtaGGAaTTCAGGTaACggGCTTATACTGTcTGGTCATGACGAGGTAAAGgTgACCCT |
| | CCTTCCATGACTCAAGCgtttaagtactctgtgctggaaacagcacagaatctactgaaacaagacaatatgtcgtgtttatcccatcaatttattggtgggatttt |
| | ttt |
| 174 | GTGGAAGCTAAGGAAGAAGCTGAGTTTAAGTACTCTGTGCTGGAAACAGCACAGAATCTACTTAAACAAGGCAAAATGCCGTGTTTATCTCGTCAACTTGTTGGCGA |
| | GATctATaTGaGAAGAATGaCaCTTGTACTTCATCCCACTGATTGTTTAAGTACTCTGTGCTGGAAACAGCACAGAATCTACTTAAACAAGGCAAAATGCCGTGTTT |
| | ATCTCGTCAACTTGTTGGCGAGATTTTTTT |
| 175 | GCTTGTACTTCATCCCACTGATTGTTTAAGTACTCTGTGCTGGAAACAGCACAGAATCTACTTAAACAAGGCAAAATGCCGTGTTTATCTCGTCAACTTGTTGGCGA |
| | GATctATaTGaGAAGAATGaCaTGGAAGCTAAGGAAGAAGCTGAGTTTAAGTACTCTGTGCTGGAAACAGCACAGAATCTACTTAAACAAGGCAAAATGCCGTGTTT |
| | ATCTCGTCAACTTGTTGGCGAGATTTTTTT |
| 176 | GAAAGAATTCAGAATCAGTGGGAGTTTAAGTACTCTGTGCTGGAAACAGCACAGAATCTACTTAAACAAGGCAAAATGCCGTGTTTATCTCGTCAACTTGTTGGCGA |
| | GATctATaTGaGAAGAATGaCaTCCTTAGCTTCCAGCCATTGTGGTTTAAGTACTCTGTGCTGGAAACAGCACAGAATCTACTTAAACAAGGCAAAATGCCGTGTTT |
| | ATCTCGTCAACTTGTTGGCGAGATTTTTTT |
| 177 | GTCCTTAGCTTCCAGCCATTGTGGTTTAAGTACTCTGTGCTGGAAACAGCACAGAATCTACTTAAACAAGGCAAAATGCCGTGTTTATCTCGTCAACTTGTTGGCGA |
| | GATctATaTGaGAAGAATGaCaAAAGAATTCAGAATCAGTGGGAGTTTAAGTACTCTGTGCTGGAAACAGCACAGAATCTACTTAAACAAGGCAAAATGCCGTGTTT |
| | ATCTCGTCAACTTGTTGGCGAGATTTTTTT |
| 178 | GAATGAAATGTTAAAGGATTCAAGTTTAAGTACTCTGTGCTGGAAACAGCACAGAATCTACTTAAACAAGGCAAAATGCCGTGTTTATCTCGTCAACTTGTTGGCGA |
| | GATctATaTGaGAAGAATGaCaAAAGAATTCAGAATCAGTGGGAGTTTAAGTACTCTGTGCTGGAAACAGCACAGAATCTACTTAAACAAGGCAAAATGCCGTGTTT |
| | ATCTCGTCAACTTGTTGGCGAGATTTTTTT |

TABLE 6
7. Exemplary SluCas9 sgRNAs targeting the 3′
untranslated region (UTR) of the human DMPK gene

| sgRNA | | SEQ ID |
|---|---|---|
| name | sgRNA sequence | NO. |
| SluD14 | CAGGCCTGGGAAGGCAGCAAGC | 9015 |
| SluU63 | ggggcTCGAAGGGTCCTTGTAG | 9016 |
| SluU64 | gggcTCGAAGGGTCCTTGTAGC | 9017 |
| SluU08 | GCCCCGTTGGAAGACTGAGTGC | 9018 |
| SluU14 | TGGAAGACTGAGTGCCCGGGGC | 9019 |
| SluU26 | GGAGCTGGGCGGAGACCCACGC | 9020 |
| SluU55 | gggccgggtccgcggccggcga | 9021 |
| SluU22 | CCAGTTCACAACCGCTCCGAGC | 9022 |
| SluU29 | CGGATCACAGGACTGGAGCTGG | 9023 |
| SluD08 | CCATCCACGTCAGGGCCTCAGC | 9024 |
| SluU10 | CCCGTTGGAAGACTGAGTGCCC | 9025 |
| SluD05 | TCGGCCAGGCTGAGGCCCTGAC | 9026 |
| SluU30 | GCCCGGATCACAGGACTGGAGC | 9027 |
| SluD25 | CTTTGCGAACCAACGATAGGTG | 9028 |
| SluU05 | GCCCCGGAGTCGAAGACAGTTC | 9029 |
| SluU07 | CACTCAGTCTTCCAACGGGGCC | 9030 |
| SluU09 | CCCCGTTGGAAGACTGAGTGCC | 9031 |
| SluU06 | TGTCTTCGACTCCGGGGCCCCG | 9032 |
| SluU33 | TGTGATCCGGGCCCGCCCCCTA | 9033 |
| SluD06 | CCAGGCTGAGGCCCTGACGTGG | 9034 |
| SluU32 | GGGGGGGGCCCGGATCACAGGA | 9035 |
| SluD92 | TTTTATTCGCGAGGGTCGGGGG | 9036 |
| SluU21 | GCTCGGAGCGGTTGTGAACTGG | 9037 |
| SluU52 | cggggagggaggggccgggtcc | 9038 |
| SluU25 | TGGGCGGAGACCCACGCTCGGA | 9039 |
| SluU59 | cgcggccggcgaacggggcTCG | 9040 |
| SluU60 | gcggccggcgaacggggcTCGA | 9041 |
| SluU01 | AACCCTAGAACTGTCTTCGACT | 9042 |
| SluD99 | AGATGGAGGGCCTTTTATTCGC | 9043 |
| SluD70 | CCCAACAACCCCAATCCACGTT | 9044 |
| SluU53 | cgcggacceggcccctccctcc | 9045 |
| SluD91 | TTTATTCGCGAGGGTCGGGGGT | 9046 |
| SluU65 | cagcagcagcaTTCCCGGCTAC | 9047 |
| SluD100 | GTCCAGAGCTTTGGGCAGATGG | 9048 |
| SluU17 | TGTGAACTGGCAGGCGGTGGGC | 9049 |
| SluD95 | GGGCCTTTTATTCGCGAGGGTC | 9050 |
| SluD101 | AGTCCAGAGCTTTGGGCAGATG | 9051 |
| SluD96 | AGGGCCTTTTATTCGCGAGGGT | 9052 |
| SluU48 | gcccctccctccccggccGCTA | 9053 |
| SluU24 | CCACGCTCGGAGCGGTTGTGAA | 9054 |
| SluU34 | GCTAGGGGGCGGGCCCGGATCA | 9055 |
| SluD26 | ACTTTGCGAACCAACGATAGGT | 9056 |
| SluD23 | CAACGATAGGTGGGGGTGCGTG | 9057 |
| SluU19 | AGCGGTTGTGAACTGGCAGGCG | 9058 |
| SluD32 | CTTGTGCATGACGCCCTGCTCT | 9059 |
| SluD83 | GTGGGGACAGACAATAAATACC | 9060 |
| SluU11 | CCCGGGCACTCAGTCTTCCAAC | 9061 |
| SluD65 | ACCTCGTCCTCCGACTCGCTGA | 9062 |
| SluU20 | CGGAGCGGTTGTGAACTGGCAG | 9063 |

### III. Methods of Gene Editing

[0290] Provided herein are methods of multiplex gene editing using nucleic acids encoding tandem guide RNAs (tgRNAs) and compositions comprising the same, to treat diseases and disorders that would benefit from multiplexing, e.g., from the excision of an exon, intron, or exon-intron junction. The disclosure provides methods and uses wherein the tgRNA, when combined with an endonuclease or nucleic acid encoding an endonuclease, is capable of making two or more edits in the genome. For example, the disclosure includes methods capable of making two cleavages to excise small or large portions of a genome. The disclosure includes methods, for example, wherein the provided tandem guide RNAs, when used with the correct endonuclease, function to precisely delete a portion of any of exons 2, 3, 6, 9, 44, 45, 47, 48, 50, 51 or 53 of the DMD gene. However, methods of excising some or all of other genomic portions, for treatment of other diseases or other purposes, is contemplated.

[0291] The disclosure provides methods that include administration or delivery of tgRNAs capable of genome editing, e.g., excising a portion of a genome. The disclosure provides for methods wherein the sgRNAs, as described above, are for use with the same class, type, subtype, and/or species of endonuclease, or a composition comprising the nucleic acid and optionally further comprising an endonuclease or a nucleic acid encoding an endonuclease.

[0292] Included here are methods of administering or delivering tgRNAs that contain two distinct spacers and target two distinct genomic loci, wherein the sgRNAs comprise scaffolds that are the same or different, but that are, in some embodiments, for use with the same class, type, subtype, and/or species of endonuclease. The disclosure also allows methods of administering or delivering tgRNAs that are capable of localizing a donor template to a Cas-induced double strand break at a tgRNA-specified genomic locus to facilitate gene correction and/or insertion. In one embodiment, a method comprises administration of a tgRNA wherein one spacer sequence of the tgRNA will be designed to target the desired genomic locus and create a double strand break (DSB) while also targeting the donor template with the second tgRNA spacer. Donor template constructs may be linear DNA with Cas/tgRNA localizing the donor template to the genomic DSB, or donor templates may be circularized with Cas/tgRNA functioning both to localize the donor to the genomic DSB and linearizing the donor template. Donors may have flanking regions of homologous sequences to the targeted genomic locus to enable homology directed repair. Alternatively, donors bearing no homology arms can be inserted into the genomic DSB via non-homologous end joining. Additional embodiments may be administered in a method, including a single tgRNA bridging between genome and donor, or administration of multiple tgRNA to allow creation of multiple double strand breaks (in genome and/or in donor) and additional bridging interactions between genome and donor.

[0293] This disclosure also provides method and uses of treating any disease and disorder that would benefit from genome editing, including the excision of an exon, intron, or exon-intron junction.

[0294] In some embodiments, the disclosure provides for a method of treating a subject (e.g., a subject having DMD), comprising treating the subject with a plurality of nucleic acids comprising a first sgRNA joined to a second sgRNA by means of a linker, wherein less than 60%, 50%, 40%, 30%, 25%, 20%, 15%, 10%, 5%, 3%, 2%, or 1% of the plurality of nucleic acids administered to the subject are processed within the subject to result in separate sgRNA molecules. In some embodiments, the disclosure provides for a method of treating a subject (e.g., a subject having DMD), comprising treating the subject with a plurality of nucleic acids comprising a first sgRNA joined to a second sgRNA by means of a linker, wherein 1-60%, 1-40%, 1-20%, 1-10%, 1-5%, 5-60%, 5-40%, 5-20%, 5-10%, 10-60%, 10-40%, 10-20%, 25-60%, 25-40%, or 40-60% of the plurality of nucleic acids administered to the subject are processed within the subject to result in separate sgRNA molecules.

[0295] This disclosure provides methods for gene editing and treating Duchenne Muscular Dystrophy (DMD). In some embodiments, any of the compositions described herein may be administered to a subject in need thereof for use in making a double strand break, or excising a portion (e.g., less than about 250 nucleotides) in any of exons 2, 3, 6, 9, 44, 45, 47, 48, 50, 51 or 53 of the dystrophin (DMD) gene, and to treat DMD.

[0296] In some embodiments, the disclosure provides a method of inserting a template DNA into genomic DNA comprising, administering to a cell the nucleic acid comprising a first sgRNA connected to a second sgRNA via a linker, wherein the sgRNAs are in some embodiments for use with the same class, type, subtype, and/or species of endonuclease, or a composition comprising the nucleic acid and optionally further comprising an endonuclease or a nucleic acid encoding an endonuclease, and a template nucleic acid, wherein the template nucleic acid is inserted into the genome.

[0297] In some embodiments, the disclosure provides for a method of inserting a template nucleic acid into genomic DNA comprising administering to a cell (e.g., a cell in a subject): a) a nucleic acid comprising a first sgRNA connected to a second sgRNA via a linker, b) a template nucleic acid; and c) an endonuclease or a nucleic acid encoding an endonuclease; wherein the first sgRNA guides the endonuclease to cut the genomic DNA at a specific locus, and wherein the second sgRNA facilitates the insertion of the donor template at the specific locus. In some embodiments, the template nucleic acid is a component of a larger polynucleotide (e.g., a plasmid or vector), and the second sgRNA guides the endonuclease to cut the polynucleotide. In some embodiments, the disclosure provides for a method of inserting a template nucleic acid into genomic DNA comprising administering to a cell (e.g., a cell in a subject): a) a first nucleic acid comprising a first sgRNA connected to a second sgRNA via a linker, b) a second nucleic acid comprising a third sgRNA connected to a fourth sgRNA via a linker; c) a template nucleic acid; and c) an endonuclease or a nucleic acid encoding an endonuclease; wherein the first sgRNA guides the endonuclease to cut the genomic DNA at a first locus and wherein the third sgRNA guides the endonuclease to cut the genomic DNA at a second locus, and wherein the second sgRNA and fourth sgRNA facilitate the incorporation of the donor template between the first and second loci. In some embodiments, one end of the template shares homology with a region abutting the first locus and the other end of the template shares homology with a region abutting the second locus. In some embodiments, the template nucleic acid is a component of a larger polynucleotide, and the second sgRNA guides the endonuclease to cut the polynucleotide at a first site and the fourth sgRNA guides the endonuclease to cut the polynucleotide at a second site. In some embodiments, the template nucleic acid is excised from the larger polynucleotide upon cleavage facilitated by the second sgRNA and fourth sgRNA. In some embodiments, a nucleotide sequence is excised from the genomic DNA as a result of the endonuclease cutting the genomic DNA at the first locus and the second locus. In some embodiments, the template is excised from the larger polynucleotide (e.g., plasmid or vector) as a result of the endonuclease cutting the polynucleotide at the first site and at the second site. In some embodiments, the larger polynucleotide is a linear polynucleotide. In some embodiments, the larger polynucleotide is a plasmid. In some embodiments, the larger polynucleotide is a circular plasmid. In some embodiments, the larger polynucleotide is a minicircle nucleic acid. In some embodiments, the larger polynucleotide is a viral nucleic acid.

[0298] In some embodiments, the template or donor nucleic acid for use in any of the compositions or methods disclosed herein is 1-200, 1-150, 1-100, 1-50, 1-25, 1-10, 1-5, 5-200, 5-150, 5-100, 5-50, 5-25, 5-10, 10-200, 10-150, 10-100, 10-50, 10-25, 25-200, 25-150, 25-100, 25-50, 50-200, 50-150, 50-100, 100-200, 100-150, or 150-200 nucleotides in length. In some embodiments, any of the methods or compositions disclosed herein excise a portion of genomic DNA that is 200-1000, 200-900, 200-700, 200-500, 200-400, 500-1000, 500-700, 1-200, 1-150, 1-100, 1-50, 1-25, 1-10, 1-5, 5-200, 5-150, 5-100, 5-50, 5-25, 5-10, 10-200, 10-150, 10-100, 10-50, 10-25, 25-200, 25-150, 25-100, 25-50, 50-200, 50-150, 50-100, 100-200, 100-150, or 150-200 nucleotides in length.

[0299] In some embodiments, tandem guide RNAs (tgRNAs) described herein, in any of the vector configurations described herein or in association with a lipid nanoparticle, may be administered to a subject in need thereof to make a double-strand break, excise a portion of a gene, and thereby treat diseases such as DMD or DM1. In some embodiments, the disclosure provides a method for treating DMD or DM1 comprising administering a therapeutically effective amount of a nucleic acid comprising a first sgRNA connected to a second sgRNA via a linker (wherein, in some embodiments, the sgRNAs are for use with the same class, type, subtype, and/or species of endonuclease), or a composition comprising the nucleic acid and optionally further comprising an endonuclease or a nucleic acid encoding an endonuclease, to a subject having DMD or DM1. In some embodiments, the sgRNAs target the DMPK gene. In particular embodiments, the sgRNAs are designed to excise CTG repeats. In particular embodiments, the sgRNAs target the dystrophin gene.

[0300] In some embodiments, the disclosure provides a method for treating a disease or disorder that would benefit from an excision of an exon, intron, or exon-intron junction or portions thereof comprising administering a therapeutically effective amount of a nucleic acid comprising a first sgRNA connected to a second sgRNA via a linker (wherein, in some embodiments, the sgRNAs are for use with the same class, type, subtype, and/or species of endonuclease), or a composition comprising the nucleic acid and optionally further comprising an endonuclease or a nucleic acid encoding an endonuclease to a subject in need thereof.

[0301] In some embodiments, the disclosure provides a method for treating a disease or disorder that would benefit from an excision of an exon, intron, or exon-intron junction comprising administering a therapeutically effective amount of a nucleic acid comprising a first sgRNA connected to a second sgRNA via a linker (wherein, in some embodiments, the sgRNAs are for use with the same class, type, subtype, and/or species of endonuclease), or a composition comprising the nucleic acid and optionally further comprising an endonuclease or a nucleic acid encoding an endonuclease to a subject in need thereof.

TABLE 7

| | Genetic Locus; | | | Pathological |
|---|---|---|---|---|
| | inheritance | | Normal repeat | repeat copy |
| Disorder | pattern | TNR | copy number | number |
| DM1/myotonic dystrophy | DMPK 3′ UTR | CTG | 5-34 | 50-5000 in most |
| type 1 | Autosomal | | (35-49 = | cells; may be |
| | dominant | | premutation, | higher in muscle |
| | | | children at risk) | cells |
| Huntington′s Disease | Huntingtin (HTT) | CAG | 10-35 | 36 to >120 |
| | exon | | | 36-39: at risk |
| | Autosomal | | | 40 or more: |
| | dominant | | | disease almost |
| | | | | always develops |
| Friedrich′s Ataxia | Frataxin (FXN) | GAA | 5-33 | 66 to >1000 |
| | intron | | | |
| | Autosomal | | | |
| | recessive | | | |
| Fragile X Syndrome (FXS) | Fragile X Mental | CGG | 5-40 | >200 |
| (see also FXPOI and | Retardation 1 | | (55-200 = | |
| FXTAS below: same locus, | (FMR1) 5′UTR | | premutation; | |
| different copy number | X-linked dominant | | risk for FXPOI | |
| ranges) | | | in females and | |
| | | | for FXTAS; | |
| | | | children of | |
| | | | women with | |
| | | | premutation at | |
| | | | risk for FXS) | |
| Fragile X associated | Fragile X Mental | CGG | 5-40 | 55-200 |
| primary ovarian | Retardation 1 | | | |
| insufficiency (FXPOI), | (FMR1) 5′UTR | | | |
| fragile X-associated | X-linked dominant | | | |
| tremor/ataxia syndrome | | | | |
| (FXTAS) | | | | |
| fragile site associated | Fragile X Mental | CGG | 4-40 | >200 |
| mental retardation/ | Retardation 2 | | (50-200 = | |
| FRAXE-associated mental | (FMR2, aka AFF2) | | premutation- | |
| deficiency; Fragile XE | 5′UTR or 5′UTR- | | considered | |
| syndrome | adjacent | | asymptomatic | |
| | X-linked; Females | | but children at | |
| | rarely diagnosed | | risk) | |
| X-linked spinal and bulbar | Androgen Receptor | CAG | Up to 36 | >38 or >39, e.g., |
| muscular atrophy (Kennedy | (AR) exon | | | 2x-3x normal (up |
| disease) | | | | to ~100) |
| ARX-associated infantile | aristaless related | GCG | Complex: ARX | Expansion to add |
| epileptic encephalopathy/ | homeobox (ARX) | | contains 4 | 1-7 repeats to first |
| Early infantile epileptic | exon | | distinct repeats | tract associated |
| encephalopathy 1/ | X-linked recessive | | of 7-16 alanine | with mental |
| Ohtahara syndrome; | | | codons each. | retardation. |
| Partington syndrome; West | | | First tract is | |
| syndrome | | | normally 16 | |
| | | | repeats. | |
| Spinocerebellar ataxia type | Ataxin 1 (ATXN1) | CAG | 4-39 | 40-80+ |
| 1 | exon | | | 40-50: mid |
| | Autosomal | | | adulthood onset |
| | dominant | | | >70: onset by |
| | | | | teens |
| Spinocerebellar ataxia type | Ataxin 2 (ATXN2) | CAG | ~22-31 | >32 |
| 2 | exon | | | 32-33: late |
| | Autosomal | | | adulthood onset |
| | dominant | | | >45: onset by |
| | | | | teens |
| Spinocerebellar ataxia type | Ataxin 3 (ATXN3) | CAG | 12-43; usually | >44 |
| 3 | exon | | 12-30 | 44-52 = |
| | Autosomal | | | intermediate, |
| | dominant | | | condition may or |
| | | | | may not develop; |
| | | | | up to 75 results in |
| | | | | mid-adulthood |
| | | | | onset; 80 results |
| | | | | in teenage onset; |
| | | | | homozygosity |
| | | | | results in |
| | | | | childhood onset |
| | | | | and increased |
| | | | | severity |
| Spinocerebellar ataxia type | Calcium voltage- | CAG | 4-35 | 37-306 |
| 6 | gated channel | | | |
| | subunit alphal A | | | |
| | (CACNA1A) exon | | | |
| | Autosomal | | | |
| | dominant | | | |
| Spinocerebellar ataxia type | Ataxin 7 (ATXN7) | CAG | 4-35 | 37-306 |
| 7 | exon | | | |
| | Autosomal | | | |
| | dominant | | | |
| Spinocerebellar ataxia type | ATXN8 opposite | TAC/TGC | 16-37 | 107-128 |
| 8 | strand IncRNA | | | or |
| | (ATXN8OS/SCA8) | | | 110-250 |
| | Noncoding RNA | | | |
| | Antisense of intron | | | |
| | in KLHL1/ATXN8 | | | |
| | Autosomal | | | |
| | dominant | | | |
| Spinocerebellar ataxia type | Serine/threonine- | CAG | 7-28 | 66-78 |
| 12 | protein | | | |
| | phosphatase 2A 55 | | | |
| | kDa regulatory | | | |
| | subunit B beta | | | |
| | isoform | | | |
| | (PPP2R2B) 5′ | | | |
| | UTR | | | |
| | Autosomal | | | |
| | dominant | | | |
| Spinocerebellar ataxia type | TATA binding | CAG | 25-42 | 50-63 |
| 17 | protein (TBP) | | | |
| | exon | | | |
| | Autosomal | | | |
| | dominant | | | |
| Dentatorubropallidoluysian | Atrophin-1 (ATN1 | CAG | 6-35 | 49-88 |
| atrophy (DRPLA) | or DRPLA) | | | |
| | exon | | | |
| | Autosomal | | | |
| | dominant | | | |

[0302] In some embodiments, trinucleotide repeats or a self-complementary region is excised by the tgRNA and endonuclease from a locus or gene associated with a disorder, such as a repeat expansion disorder, which may be a trinucleotide repeat expansion disorder. A repeat expansion disorder is one in which unaffected individuals have alleles with a number of repeats in a normal range, and individuals having the disorder or at risk for the disorder have one or two alleles with a number of repeats in an elevated range relative to the normal range. Exemplary repeat expansion disorders are listed and described in Table 7. In some embodiments, the repeat expansion disorder is any one of the disorders listed in Table 7. In some embodiments, the repeat expansion disorder is DM1. In some embodiments, the repeat expansion disorder is Huntington's Disease. In some embodiments, the repeat expansion disorder is Fragile X Syndrome. In some embodiments, the repeat expansion disorder is a spinocerebellar ataxia. In some embodiments, the repeat expansion disorder is Friedrich's Ataxia. In some embodiments, the locus or gene from which the trinucleotide repeats are excised is DMPK. In some embodiments, the locus or gene from which the trinucleotide repeats are excised is HTT. In some embodiments, the locus or gene from which the trinucleotide repeats are excised is Frataxin. In some embodiments, the locus or gene from which the trinucleotide repeats are excised is FMR1. In some embodiments, the locus or gene from which the trinucleotide repeats are excised is an Ataxin. In some embodiments, the locus or gene from which the trinucleotide repeats are excised is a gene associated with a type of spinocerebellar ataxia.

[0303] The number of repeats that is excised may be at least 1, 2, 3, 4, 5, 6, 7, 8, 9, 10, 15, 20, 25, 30, 40, 50, 60, 70, 80, 90, 100, 150, 200, 300, 400, 500, 600, 700, 800, 900, 1000, 1500, 2000, 3000, 4000, 5000, 6000, 7000, 8000, 9000, or 10,000, or in a range bounded by any two of the foregoing numbers.

[0304] For example, where the TNRs are within the DMPK gene, excision of the TNRs may ameliorate one or more phenotypes associated with an expanded-repeat DMPK gene, e.g., one or more of increasing myotonic dystrophy protein kinase activity; increasing phosphorylation of phospholemman, dihydropyridine receptor, myogenin, L-type calcium channel beta subunit, and/or myosin phosphatase targeting subunit; increasing inhibition of myosin phosphatase; and/or ameliorating muscle loss, muscle weakness, hypersomnia, one or more executive function deficiencies, insulin resistance, cataract formation, balding, or male infertility or low fertility.

[0305] Where the TNRs are within the HTT gene, excision of the TNRs may ameliorate one or more phenotypes associated with an expanded-repeat HTT gene, e.g., one or more of striatal neuron loss, involuntary movements, irritability, depression, small involuntary movements, poor coordination, difficulty learning new information or making decisions, difficulty walking, speaking, and/or swallowing, and/or a decline in thinking and/or reasoning abilities.

[0306] Where the TNRs are within the FMR1 gene, excision of the TNRs may ameliorate one or more phenotypes associated with an expanded-repeat FMR1 gene, e.g., one or more of aberrant FMR1 transcript or Fragile X Mental Retardation Protein levels, translational dysregulation of mRNAs normally associated with FMRP, lowered levels of phospho-cofilin (CFL1), increased levels of phospho-cofilin phosphatase PPP2CA, diminished mRNA transport to neuronal synapses, increased expression of HSP27, HSP70, and/or CRYAB, abnormal cellular distribution of lamin A/C isoforms, early-onset menopause such as menopause before age 40 years, defects in ovarian development or function, elevated level of serum gonadotropins (e.g., FSH), progressive intention tremor, parkinsonism, cognitive decline, generalized brain atrophy, impotence, and/or developmental delay.

[0307] Where the TNRs are within the FMR2 gene or adjacent to the 5′ UTR of FMR2, excision of the TNRs may ameliorate one or more phenotypes associated with expanded-repeats in or adjacent to the FMR2 gene, e.g., one or more of aberrant FMR2 expression, developmental delays, poor eye contact, repetitive use of language, and hand-flapping.

[0308] Where the TNRs are within the AR gene, excision of the TNRs may ameliorate one or more phenotypes associated with an expanded-repeat AR gene, e.g., one or more of aberrant AR expression; production of a C-terminally truncated fragment of the androgen receptor protein; proteolysis of androgen receptor protein by caspase-3 and/or through the ubiquitin-proteasome pathway; formation of nuclear inclusions comprising CREB-binding protein; aberrant phosphorylation of p44/42, p38, and/or SAPK/JNK; muscle weakness; muscle wasting; difficulty walking, swallowing, and/or speaking; gynecomastia; and/or male infertility.

[0309] Where the TNRs are within the ATXN1 gene, excision of the TNRs may ameliorate one or more phenotypes associated with an expanded-repeat ATXN1 gene, e.g., one or more of formation of aggregates comprising ATXN1; Purkinje cell death; ataxia; muscle stiffness; rapid, involuntary eye movements; limb numbness, tingling, or pain; and/or muscle twitches.

[0310] Where the TNRs are within the ATXN2 gene, excision of the TNRs may ameliorate one or more phenotypes associated with an expanded-repeat ATXN2 gene, e.g., one or more of aberrant ATXN2 production; Purkinje cell death; ataxia; difficulty speaking or swallowing; loss of sensation and weakness in the limbs; dementia; muscle wasting; uncontrolled muscle tensing; and/or involuntary jerking movements.

[0311] Where the TNRs are within the ATXN3 gene, excision of the TNRs may ameliorate one or more phenotypes associated with an expanded-repeat ATXN3 gene, e.g., one or more of aberrant ATXN3 levels; aberrant beclin-1 levels; inhibition of autophagy; impaired regulation of superoxide dismutase 2; ataxia; difficulty swallowing; loss of sensation and weakness in the limbs; dementia; muscle stiffness; uncontrolled muscle tensing; tremors; restless leg symptoms; and/or muscle cramps.

[0312] Where the TNRs are within the CACNA1A gene, excision of the TNRs may ameliorate one or more phenotypes associated with an expanded-repeat CACNA1A gene, e.g., one or more of aberrant CaV2.1 voltage-gated calcium channels in CACNA1A-expressing cells; ataxia; difficulty speaking; involuntary eye movements; double vision; loss of arm coordination; tremors; and/or uncontrolled muscle tensing.

[0313] Where the TNRs are within the ATXN7 gene, excision of the TNRs may ameliorate one or more phenotypes associated with an expanded-repeat ATXN7 gene, e.g., one or more of aberrant histone acetylation; aberrant histone deubiquitination; impairment of transactivation by CRX; formation of nuclear inclusions comprising ATXN7; ataxia; incoordination of gait; poor coordination of hands, speech and/or eye movements; retinal degeneration; and/or pigmentary macular dystrophy.

[0314] Where the TNRs are within the ATXN8OS gene, excision of the TNRs may ameliorate one or more phenotypes associated with an expanded-repeat ATXN8OS gene, e.g., one or more of formation of ribonuclear inclusions comprising ATXN8OS mRNA; aberrant KLHL1 protein expression; ataxia; difficulty speaking and/or walking; and/or involuntary eye movements.

[0315] Where the TNRs are within the PPP2R2B gene, excision of the TNRs may ameliorate one or more phenotypes associated with an expanded-repeat PPP2R2B gene, e.g., one or more of aberrant PPP2R2B expression; aberrant phosphatase 2 activity; ataxia; cerebellar degeneration; difficulty walking; and/or poor coordination of hands, speech and/or eye movements.

[0316] Where the TNRs are within the TBP gene, excision of the TNRs may ameliorate one or more phenotypes associated with an expanded-repeat TBP gene, e.g., one or more of aberrant transcription initiation; aberrant TBP protein accumulation (e.g., in cerebellar neurons); aberrant cerebellar neuron cell death; ataxia; difficulty walking; muscle weakness; and/or loss of cognitive abilities.

[0317] Where the TNRs are within the ATN1 gene, excision of the TNRs may ameliorate one or more phenotypes associated with an expanded-repeat ATN1 gene, e.g., one or more of aberrant transcriptional regulation; aberrant ATN1 protein accumulation (e.g., in neurons); aberrant neuron cell death; involuntary movements; and/or loss of cognitive abilities.

[0318] In some embodiments, any one or more of the gRNAs, vectors, DNA-PK inhibitors, compositions, or pharmaceutical formulations described herein is for use in a method disclosed herein or in preparing a medicament for treating or preventing a disease or disorder in a subject. In some embodiments, treatment and/or prevention is accomplished with a single dose, e.g., one-time treatment, of medicament/composition.

[0319] In some embodiments, the disclosure provides a method of treating or preventing a disease or disorder in subject comprising administering any one or more of the tgRNAs, vectors, compositions, or pharmaceutical formulations described herein. In some embodiments, the tgRNAs, vectors, compositions, or pharmaceutical formulations described herein are administered as a single dose, e.g., at one time. In some embodiments, the single dose achieves durable treatment and/or prevention. In some embodiments, the method achieves durable treatment and/or prevention. Durable treatment and/or prevention, as used herein, includes treatment and/or prevention that extends at least i) 3, 4, 5, 6, 7, 8, 9, 10, 11, 12, 13, 14, or 15 weeks; ii) 1, 2, 3, 4, 5, 6, 7, 8, 9, 10, 11, 12, 18, 24, 30, or 36 months; or iii) 1, 2, 3, 4, 5, 6, 7, 8, 9, or 10 years. In some embodiments, a single dose of the tgRNAs, vectors, compositions, or pharmaceutical formulations described herein is sufficient to treat and/or prevent any of the indications described herein for the duration of the subject's life.

[0320] In some embodiments, excision of a repeat or self-complementary region ameliorates at least one phenotype or symptom associated with the repeat or self-complementary region or associated with a disorder associated with the repeat or self-complementary region. This may include ameliorating aberrant expression of a gene encompassing or near the repeat or self-complementary region, or ameliorating aberrant activity of a gene product (noncoding RNA, mRNA, or polypeptide) encoded by a gene encompassing the repeat or self-complementary region.

[0321] In some embodiments, the subject is a mammal. In some embodiments, the subject is human.

[0322] For treatment of a subject (e.g., a human), any of the compositions disclosed herein may be administered in a manner compatible with the dosage formulation and in such amount as is therapeutically effective. The compositions may be readily administered in a variety of dosage forms, such as injectable solutions. For parenteral administration in an aqueous solution, for example, the solution will generally be suitably buffered and the liquid diluent first rendered isotonic with, for example, sufficient saline or glucose. Such aqueous solutions may be used, for example, for intravenous, intramuscular, subcutaneous, and/or intraperitoneal administration.

### Combination Therapy

[0323] In some embodiments, the disclosure comprises combination therapies comprising any of the methods or uses described herein together with an additional therapy suitable for ameliorating any disease or disorder that would benefit from an excision of an exon, intron, or exon-intron junction, including DMD and DM1.

### EXAMPLES

[0324] The following examples are provided to illustrate certain disclosed embodiments and are not to be construed as limiting the scope of this disclosure in any way.

### Example 1: Tandem gRNA (tgRNA) Design

### A. Materials and Methods

1. sgRNA Selection

[0325] Each tandem guide RNA (tgRNA) used in the examples comprised 2 sgRNA sequences with an intervening ssRNA linker. tgRNA were expressed as a single transcript from a U6 promoter within a plasmid that also expressed SluCas9-T2A-EGFP, SaCas9KKH-T2A-EGFP, sRGN3.1-T2A-EGFP or sRGN3.3-T2A-EGFP.

[0326] tgRNAs were named to describe both gRNA identities as well as linker length. For example, Sl21-14fused50 was a tgRNA with Sl21 gRNA upstream, a 50-nucleotide linker, and Sl14 gRNA downstream. For each of the 3 tested pairs of tandem guides (Slu23-8, Slu14-21, and Slu19-21), tgRNA plasmids were constructed to have each gRNA in both upstream and downstream positions. Molecules without a linker, in which no nucleotides were added in between the two gRNAs (also known as a “0 nucleotide linker”) were tested. Additionally, seven linkers oflengths 10 (SEQ ID NO: 100), 20 (SEQ ID NO: 101), 30 (SEQ ID NO: 102), 40 (SEQ ID NO: 103), 50 (SEQ ID NO: 104), 100 (SEQ ID NO: 105), and 200 (SEQ ID NO: 106) nucleotides, were tested, as shown in Table 8. The guide pairs used to construct tgRNAs had both protospacers positioned in tandem in the genome.

TABLE 8

| 0 nucleotide linker | No nucleotides |
|---|---|
| (plasmid DNA sequence) | were added in between the two guide RNAs |
| 10 nucleotide linker (plasmid | TCTATTGACA (SEQ ID NO: 100) |
| DNA sequence) | |
| 20 nucleotide linker (plasmid | TCTATATGAGAAGAATGACA (SEQ ID NO: 101) |
| DNA sequence) | |
| 30 nucleotide linker (plasmid | TCTATATGAGACCGACAATTAAGAATGACA (SEQ ID NO: 102) |
| DNA sequence) | |
| 40 nucleotide linker (plasmid | TCTATATGAGACCGACAATGCCCCACAATTAAGAATGACA (SEQ |
| DNA sequence) | ID NO: 103) |
| 50 nucleotide linker (plasmid | TCTATATGAGACCGACAATGCAGCTGAGAACCCCACAATTAAG |
| DNA sequence) | AATGACA (SEQ ID NO: 104) |
| 100 nucleotide linker (plasmid | TACAATATGTAGGAGTGAGAGTGGTAAGGACATCAGCGATTAG |
| DNA sequence) | GACGATAGGAATTCAGGTAACGGGCTTATACTGTCTGGTCATGA |
| | CGAGGTAAAGGTG (SEQ ID NO: 105) |
| 200 nucleotide linker (plasmid | ATAACATGAAACATTACACAATACACAATCATAGGTTACCATGC |
| DNA sequence) | TTACCACTCTGCTTAAACTGCCCTCTAATACCTTATCCTACTCAG |
| | CTTCAGACATCGCACTCCACTCGCATAACAGTTACGCTTCGACT |
| | CAGCGCATCAAGATAACTCTACCAACTTCGTATAGCAATATTCA |
| | GGTCGTCGAATTCCCCACACGTA (SEQ ID NO: 106) |

[0327] Linkers were designed to be minimally structured. The corresponding RNA linker sequences were iteratively submitted to RNAfold (http://ma.tbi.univie.ac.at/) and any nucleotides predicted to form secondary structure were substituted for alternative nucleotides that gave less structured predictions. Linkers shorter than 50 nucleotides were created by removal of centermost nucleotides to preserve linker/guide RNA junctions.

[0328] Additional plasmids were utilized that expressed each of the respective guide pairs as individual transcripts from separate U6 promoters as well as expressing SluCas9-T2A-EGFP. These plasmids were denoted as pVT-49 (individual expression of Sl23 gRNA and Sl8 gRNA), pVT-56 (Sl14 and Sl21 gRNAs), pVT-61 (Sl19 and Sl21 gRNAs), pVTXX_16_23 (S116 and Sl23 gRNAs) and pVTXX_3_7 (Sl3 and S17 gRNAs). Additional control plasmids included pVT-45 and pVTOO1 which are the parental plasmids containing SluCas9-T2A-EGFP and nontargeting gRNAs. pVT-45 contained two nontargeting sgRNAs (control plasmid for pVT-49/pVT-5S6/pVT-61) while pVTOO1 contained only a single nontargeting gRNA (control plasmid for all tgRNA plasmid constructs). Tables 9-16 provide structures and sequences of plasmids used in the Examples described herein.

TABLE 9
structures and sequences of plasmids used in the experiments shown in FIGS. 1-4. The Cas9
is SluCas9 and the SluCas9 scaffold is “v2” for all plasmids below (except the Mock).

| | | | | | U6 promoter | |
|---|---|---|---|---|---|---|
| | | | | Linker GC | transcriptional | |
| | | | | Content | start site: +1G | |
| Plasmid/Sample ID | Plasmid/Sample Description | Linker Sequence | Notes on Linker | (%) | added to U6? | tgRNA |
| Mock | No Plasmid | N/A | N/A | N/A | N/A | N/A |
| pVT001 (single | nontargeting control (has SluCas9 | N/A; not fused | N/A | N/A | Yes | N/A |
| nontargeting) | and guide scaffold but spacer is | | | | | |
| | nontargeting stuffer sequence) | | | | | |
| pVT-45 (dual | nontargeting control (has SluCas9 | N/A; not fused | N/A | N/A | Yes | N/A |
| nontargeting) | and two guide scaffolds but spacers | | | | | |
| | are nontargeting stuffer sequences) | | | | | |
| pVT-49 (Slu 23-8) | Traditional, not fused guides, each | N/A; not fused | N/A | N/A | Yes | N/A |
| | guide being expressed from its own | | | | | |
| | U6 promoter. Sl23 is upstream and | | | | | |
| | Sl8 is downstream of SluCas9 | | | | | |
| | cassette. | | | | | |
| pVT-56 (Slu 14-21) | Traditional, not fused guides, each | N/A; not fused | N/A | N/A | Yes | N/A |
| | guide being expressed from its own | | | | | |
| | U6 promoter. Sl14 is upstream and | | | | | |
| | Sl21 is downstream of SluCas9 | | | | | |
| | cassette. | | | | | |
| pVT-61 (Slu 19-21) | Traditional, not fused guides, each | N/A; not fused | N/A | N/A | Yes | N/A |
| | guide being expressed from its own | | | | | |
| | U6 promoter. Sl19 is upstream and | | | | | |
| | Sl21 is downstream of SluCas9 | | | | | |
| | cassette. | | | | | |
| Sl8-23fused50 | Fused guide RNA with Sl8 as first | SEQ ID NO: 104 | 50 nucleotides | 42 | No | 121 |
| | guide, followed by 50 nt linker, and | | | | | |
| | Sl23 as the second guide. | | | | | |
| Sl8-23fused100 | Fused guide RNA with Sl8 as first | SEQ ID NO: 105 | 100 nucleotides | 45 | No | 122 |
| | guide, followed by 100 nt linker, and | | | | | |
| | Sl23 as the second guide. | | | | | |
| Sl8-23fused200 | Fused guide RNA with Sl8 as first | SEQ ID NO: 106 | 200 nucleotides | 43 | No | 123 |
| | guide, followed by 200 nt linker, and | | | | | |
| | Sl23 as the second guide. | | | | | |
| Sl23-8fused50 | Fused guide RNA with Sl23 as first | SEQ ID NO: 104 | 50 nucleotides | 42 | No | 124 |
| | guide, followed by 50 nt linker, and | | | | | |
| | Sl8 as the second guide. | | | | | |
| Sl23-8fused100 | Fused guide RNA with Sl23 as first | SEQ ID NO: 105 | 100 nucleotides | 45 | No | 125 |
| | guide, followed by 100 nt linker, and | | | | | |
| | Sl8 as the second guide. | | | | | |
| Sl23-8fused200 | Fused guide RNA with Sl23 as first | SEQ ID NO: 106 | 200 nucleotides | 43 | No | 126 |
| | guide, followed by 200 nt linker, and | | | | | |
| | Sl8 as the second guide. | | | | | |
| Sl14-21fused50 | Fused guide RNA with Sl14 as first | SEQ ID NO: 104 | 50 nucleotides | 42 | No | 127 |
| | guide, followed by 50 nt linker, and | | | | | |
| | Sl21 as the second guide. | | | | | |
| Sl14-21fused100 | Fused guide RNA with Sl14 as first | SEQ ID NO: 105 | 100 nucleotides | 45 | No | 128 |
| | guide, followed by 100 nt linker, and | | | | | |
| | Sl21 as the second guide. | | | | | |
| Sl14-21fused200 | Fused guide RNA with Sl14 as first | SEQ ID NO: 106 | 200 nucleotides | 43 | No | 129 |
| | guide, followed by 200 nt linker, and | | | | | |
| | Sl21 as the second guide. | | | | | |
| Sl21-14fused50 | Fused guide RNA with Sl21 as first | SEQ ID NO: 104 | 50 nucleotides | 42 | No | 130 |
| | guide, followed by 50 nt linker, and | | | | | |
| | Sl14 as the second guide. | | | | | |
| Sl21-14fused100 | Fused guide RNA with Sl21 as first | SEQ ID NO: 105 | 100 nucleotides | 45 | No | 131 |
| | guide, followed by 100 nt linker, and | | | | | |
| | Sl14 as the second guide. | | | | | |
| Sl21-14fused200 | Fused guide RNA with Sl21 as first | SEQ ID NO: 106 | 200 nucleotides | 43 | No | 132 |
| | guide, followed by 200 nt linker, and | | | | | |
| | Sl14 as the second guide. | | | | | |
| Sl19-21fused50 | Fused guide RNA with Sl19 as first | SEQ ID NO: 104 | 50 nucleotides | 42 | No | 133 |
| | guide, followed by 50 nt linker, and | | | | | |
| | Sl21 as the second guide. | | | | | |
| Sl19-21fused100 | Fused guide RNA with Sl19 as first | SEQ ID NO: 105 | 100 nucleotides | 45 | No | 134 |
| | guide, followed by 100 nt linker, and | | | | | |
| | Sl21 as the second guide. | | | | | |
| Sl19-21fused200 | Fused guide RNA with Sl19 as first | SEQ ID NO: 106 | 200 nucleotides | 43 | No | 135 |
| | guide, followed by 200 nt linker, and | | | | | |
| | Sl21 as the second guide. | | | | | |
| Sl21-19fused50 | Fused guide RNA with Sl21 as first | SEQ ID NO: 104 | 50 nucleotides | 42 | No | 136 |
| | guide, followed by 50 nt linker, and | | | | | |
| | Sl19 as the second guide. | | | | | |
| Sl21-19fused100 | Fused guide RNA with Sl21 as first | SEQ ID NO: 105 | 100 nucleotides | 45 | No | 137 |
| | guide, followed by 100 nt linker, and | | | | | |
| | Sl19 as the second guide. | | | | | |
| Sl21-19fused200 | Fused guide RNA with Sl21 as first | SEQ ID NO: 106 | 200 nucleotides | 43 | No | 138 |
| | guide, followed by 200 nt linker, and | | | | | |
| | Sl19 as the second guide. | | | | | |

TABLE 10
Structures and sequences of plasmids used in the experiments shown in FIG. 6A. The Cas9
is SluCas9 and the SluCas9 scaffold is “v2” for all plasmids below (except the Mock).

| | | | | | U6 promoter | |
|---|---|---|---|---|---|---|
| | | | | Linker GC | transcriptional | |
| Plasmid/ | | | | Content | start site: +1G | |
| Sample ID | Plasmid/Sample Description | Linker Sequence | Notes on Linker | (%) | added to U6? | tgRNA |
| Mock | No Plasmid | N/A | N/A | N/A | N/A | N/A |
| p62 | Traditional, not fused guides, each | N/A; not fused | N/A | N/A | Yes | N/A |
| | guide being expressed from its own | | | | | |
| | U6 promoter. SL16 is upstream and | | | | | |
| | SL23 is downstream of SluCas9 | | | | | |
| | cassette. | | | | | |
| pVT001 (single | nontargeting control (has SluCas9 and | N/A; not fused | N/A | N/A | Yes | N/A |
| nontargeting) | guide scaffold but spacer is | | | | | |
| | nontargeting stuffer sequence) | | | | | |
| pVT45 (dual | nontargeting control (has SluCas9 and | N/A; not fused | N/A | N/A | Yes | N/A |
| nontargeting) | two guide scaffolds but spacers are | | | | | |
| | nontargeting stuffer sequences) | | | | | |
| SL16_23Fused50 | Fused guide RNA with Sl16 as first | SEQ ID NO: 104 | 50 nucleotides | 42 | No | 139 |
| | guide, followed by 50 nt linker, and | | | | | |
| | Sl23 as the second guide. | | | | | |
| SL16_23Fused40 | Fused guide RNA with Sl16 as first | SEQ ID NO: 103 | 40 nucleotides | 40 | No | 140 |
| | guide, followed by 40 nt linker, and | | | | | |
| | Sl23 as the second guide. | | | | | |
| SL16_23Fused30 | Fused guide RNA with Sl16 as first | SEQ ID NO: 102 | 30 nucleotides | 33 | No | 141 |
| | guide, followed by 30 nt linker, and | | | | | |
| | Sl23 as the second guide. | | | | | |
| SL16_23Fused20 | Fused guide RNA with Sl16 as first | SEQ ID NO: 101 | 20 nucleotides | 30 | No | 142 |
| | guide, followed by 20 nt linker, and | | | | | |
| | Sl23 as the second guide. | | | | | |
| SL16_23Fused10 | Fused guide RNA with Sl16 as first | SEQ ID NO: 100 | 10 nucleotides | 30 | No | 143 |
| | guide, followed by 10 nt linker, and | | | | | |
| | Sl23 as the second guide. | | | | | |
| SL16_23Fused0 | Fused guide RNA with Sl16 as the | N/A; no linker | 0 nucleotides | N/A | No | 144 |
| | first guide and Sl23 as the second | | | | | |
| | guide. Linker of 0 nt (guides | | | | | |
| | connected with no intervening | | | | | |
| | sequence). | | | | | |

TABLE 11
Structures and sequences of plasmids used in the experiments shown in FIG. 6B. The Cas9
is SluCas9 and the SluCas9 scaffold is “v2” for all plasmids below (except the Mock).

| | | | | | U6 promoter | |
|---|---|---|---|---|---|---|
| | | | | Linker GC | transcriptional | |
| Plasmid/Sample | | | | Content | start site: +1G | |
| +C1+A1:G11 | Plasmid/Sample Description | Linker Sequence | Notes on Linker | (%) | added to U6? | tgRNA |
| Mock | No Plasmid | N/A | N/A | N/A | N/A | N/A |
| p127 | Traditional, not fused guides, each | N/A; not fused | N/A | N/A | Yes | N/A |
| | guide being expressed from its own | | | | | |
| | U6 promoter. Sl3 is upstream and | | | | | |
| | Sl7 is downstream of SluCas9 | | | | | |
| | cassette. | | | | | |
| pVT001 (single | nontargeting control (has SluCas9 | N/A; not fused | N/A | N/A | Yes | N/A |
| nontargeting) | and guide scaffold but spacer is | | | | | |
| | nontargeting stuffer sequence) | | | | | |
| pVT45 (dual | nontargeting control (has SluCas9 | N/A; not fused | N/A | N/A | Yes | N/A |
| nontargeting) | and two guide scaffolds but spacers | | | | | |
| | are nontargeting stuffer sequences) | | | | | |
| SL7_3Fused50 | Fused guide RNA with Sl7 as first | SEQ ID NO: 104 | 50 nucleotides | 42 | No | 145 |
| | guide, followed by 50 nt linker, and | | | | | |
| | Sl3 as the second guide. | | | | | |
| SL7_3Fused40 | Fused guide RNA with Sl7 as first | SEQ ID NO: 103 | 40 nucleotides | 40 | No | 146 |
| | guide, followed by 40 nt linker, and | | | | | |
| | Sl3 as the second guide. | | | | | |
| SL7_3Fused30 | Fused guide RNA with Sl7 as first | SEQ ID NO: 102 | 30 nucleotides | 33 | No | 147 |
| | guide, followed by 30 nt linker, and | | | | | |
| | Sl3 as the second guide. | | | | | |
| SL7_3Fused20 | Fused guide RNA with Sl7 as first | SEQ ID NO: 101 | 20 nucleotides | 30 | No | 148 |
| | guide, followed by 20 nt linker, and | | | | | |
| | Sl3 as the second guide. | | | | | |
| SL7_3Fused10 | Fused guide RNA with Sl7 as first | SEQ ID NO: 100 | 10 nucleotides | 30 | No | 149 |
| | guide, followed by 10 nt linker, and | | | | | |
| | Sl3 as the second guide. | | | | | |
| SL7_3Fused0 | Fused guide RNA with Sl7 as the | N/A; no linker | 0 nucleotides | N/A | No | 150 |
| | first guide and Sl3 as the second | | | | | |
| | guide. Linker of 0 nt (guides | | | | | |
| | connected with no intervening | | | | | |
| | sequence) | | | | | |

TABLE 12
Structures and sequences of plasmids used in the experiments shown in FIG. 7. The Cas9
is SluCas9 and the SluCas9 scaffold is “v2” for all plasmids below (except the Mock).

| | | | | | U6 promoter | |
|---|---|---|---|---|---|---|
| | | | | Linker GC | transcriptional | |
| | | | | Content | start site: +1G | |
| Plasmid/Sample ID | Plasmid/Sample Description | Linker Sequence | Notes on Linker | (%) | added to U6? | tgRNA |
| Mock | No Plasmid | N/A | N/A | N/A | N/A | N/A |
| pVT001 (single | nontargeting control (has SluCas9 | N/A; not fused | N/A | N/A | Yes | N/A |
| nontargeting) | and guide scaffold but spacer is | | | | | |
| | nontargeting stuffer sequence) | | | | | |
| pVT45 (dual | nontargeting control (has SluCas9 | N/A; not fused | N/A | N/A | No | N/A |
| nontargeting) | and two guide scaffolds but spacers | | | | | |
| | are nontargeting stuffer sequences) | | | | | |
| pFGRNA22-v1Linker | Fused guide RNA with Sl16 as first | SEQ ID NO: 101 | Same as above 20 nt | 30 | No | 151 |
| | guide, followed by 20 nt linker, and | | linker, referred to | | | |
| | Sl23 as the second guide. | | here as v1. | | | |
| | | | hypothesized to be | | | |
| | | | linear in | | | |
| | | | conformation | | | |
| pFGRNA23-v2Linker | Fused guide RNA with Sl16 as first | SEQ ID NO: 112 | v2 linker. | 30 | No | 152 |
| | guide, followed by 20 nt linker, and | | hypothesized to be | | | |
| | Sl23 as the second guide. | | linear in | | | |
| | | | conformation | | | |
| pFGRNA24-v3Linker | Fused guide RNA with Sl16 as first | SEQ ID NO: 113 | v3 linker. | 35 | No | 153 |
| | guide, followed by 20 nt linker, and | | hypothesized to be | | | |
| | Sl23 as the second guide. | | linear in | | | |
| | | | conformation | | | |
| pFGRNA25-v4Linker | Fused guide RNA with Sl16 as first | SEQ ID NO: 114 | v4 linker. | 50 | No | 154 |
| | guide, followed by 20 nt linker, and | | hypothesized to be | | | |
| | Sl23 as the second guide. | | linear in | | | |
| | | | conformation | | | |
| pFGRNA26-TARLinker | Fused guide RNA with Sl16 as first | SEQ ID NO: 115 | TAR RNA sequence | 52 | No | 155 |
| | guide, followed by a structured | | with 10 additional | | | |
| | linker, and Sl23 as the second guide. | | nucleotides on each | | | |
| | | | end (split the 20 nt | | | |
| | | | linker and inserted | | | |
| | | | TAR sequence in | | | |
| | | | the center | | | |
| pFGRNA27-P4- | Fused guide RNA with Sl16 as first | SEQ ID NO: 116 | P4-P6 RNA | 47 | No | 156 |
| P6Linker | guide, followed by a structured | | sequence with 10 | | | |
| | linker, and Sl23 as the second guide. | | additional | | | |
| | | | nucleotides on each | | | |
| | | | end (split the 20 nt | | | |
| | | | linker and inserted | | | |
| | | | P4-P6 sequence in | | | |
| | | | the center | | | |

TABLE 13
Structures and sequences of plasmids used in the experiments shown in FIG. 8. The Cas9 is SluCas9 for all plasmids below (except the Mock).

| | | | | | | U6 promoter | |
|---|---|---|---|---|---|---|---|
| | | | | Linker GC | SluCas9 | transcriptional | |
| Plasmid/Sample | Plasmid/Sample | | | Content | scaffold | start site: +1G | |
| ID | Description | Linker Sequence | Notes on Linker | (%) | version | added to U6? | tgRNA |
| Mock | No plasmid | N/A | N/A | N/A | N/A | N/A | N/A |
| pVT001 (single | nontargeting control (has | N/A; not fused | N/A | N/A | v2 | Yes | N/A |
| nontargeting) | SluCas9 and guide | | | | | | |
| | scaffold but spacer is | | | | | | |
| | nontargeting stuffer | | | | | | |
| | sequence) | | | | | | |
| pVT45 (dual | nontargeting control (has | N/A; not fused | N/A | N/A | v2 | Yes | N/A |
| nontargeting) | SluCas9 and two guide | | | | | | |
| | scaffolds but spacers are | | | | | | |
| | nontargeting stuffer | | | | | | |
| | sequences) | | | | | | |
| pFGRNA22 | Fused guide RNA with | SEQ ID NO: 101 | original 20 nucleotide linker | 30 | v2 | Yes | 151 |
| | Sl16 as first guide, | | (v1 linker). | | | | |
| | followed by 20 nt linker, | | | | | | |
| | and Sl23 as the second | | | | | | |
| | guide. | | | | | | |
| pFGRNA28 | Fused guide RNA with | SEQ ID NO: 117 | 20 nucleotide linker. | 30 | v2 | Yes | 157 |
| | Sl16 as first guide, | | Extended complementarity to | | | | |
| | followed by 20 nt linker, | | the target strand of DNA such | | | | |
| | and Sl23 as the second | | that the last 4 nucleotides of | | | | |
| | guide. | | the linker are complementary | | | | |
| | | | to the target strand DNA. | | | | |
| | | | This extended | | | | |
| | | | complementarity is | | | | |
| | | | immediately upstream of the | | | | |
| | | | second spacer sequence of the | | | | |
| | | | fgRNA | | | | |
| pFGRNA29 | Fused guide RNA with | SEQ ID NO: 118 | 20 nucleotide linker. | 30 | v2 | Yes | 158 |
| | Sl16 as first guide, | | Extended complementarity to | | | | |
| | followed by 20 nt linker, | | the target strand of DNA such | | | | |
| | and Sl23 as the second | | that the last 2 nucleotides of | | | | |
| | guide. | | the linker are complementary | | | | |
| | | | to the target strand DNA. | | | | |
| | | | This extended | | | | |
| | | | complementarity is | | | | |
| | | | immediately upstream of the | | | | |
| | | | second spacer sequence of the | | | | |
| | | | fgRNA | | | | |
| pFGRNA30 | Fused guide RNA with | SEQ ID NO: 119 | v5 linker, still 20 nucleotides, | 15 | v2 | Yes | 159 |
| | Sl16 as first guide, | | but reduced GC content | | | | |
| | followed by 20 nt linker, | | | | | | |
| | and Sl23 as the second | | | | | | |
| | guide. | | | | | | |
| pFGRNA31 | Fused guide RNA with | SEQ ID NO: 120 | v6 linker, still 20 nucleotides, | 0 | v2 | Yes | 160 |
| | Sl16 as first guide, | | but reduced GC content | | | | |
| | followed by 20 nt linker, | | | | | | |
| | and Sl23 as the second | | | | | | |
| | guide. | | | | | | |
| pFGRNA32 | Fused guide RNA with | SEQ ID NO: 101 | original 20 nucleotide linker | 30 | v5 | Yes | 161 |
| | Sl16 as first guide, | | (v1 linker). | | | | |
| | followed by 20 nt linker, | | | | | | |
| | and Sl23 as the second | | | | | | |
| | guide. | | | | | | |
| SL16 23Fused20 | Fused guide RNA with | SEQ ID NO: 101 | original 20 nucleotide linker | 30 | v2 | No | 142 |
| (pFGRNA- | Sl16 as first guide, | | (v1 linker). | | | | |
| minusG) | followed by 20 nt linker, | | | | | | |
| | and Sl23 as the second | | | | | | |
| | guide. | | | | | | |

TABLE 14
Structures and sequences of plasmids used in the experiments
shown in FIG. 9. The linker was SEQ ID NO: 101 (original 20-1
with a 30% GC content), and a + 1G was added to the U6 promoter
transcriptional start site for all plasmids below (except the Mock). Add
plasmids below (except Mock), the plasmid was a fused guide RNA with
Sl16 as the first guide, followed by the linker, and Sl23 as the second guide.

| | Slu Cas9 scaffold | Cas9 | |
|---|---|---|---|
| Plasmid/Sample ID | version | Identity | tgRNA |
| Mock | N/A | N/A | N/A |
| pFGRNA33 (Slu, v2 scaffold) | v2 | SluCas9 | 151 |
| pFGRNA34 (Slu, v5 scaffold | v5 | SluCas9 | 161 |
| pFGRNA35 (sRGN3.1, v5 scaffold) | v5 | SRGN3.1 | 161 |
| pFGRNA36 (sRGN3.3, v5 scaffold) | v5 | SRGN3.3 | 161 |

TABLE 15
Structures and sequences of plasmids used in the experiments shown in FIG. 10. The Cas9 is SluCas9, the SluCas9 scaffold
is “v2,” and a +1G was added to the U6 promoter transcriptional start site for all plasmids below (except the Mock).

| | | | | Linker GC | Orientation | |
|---|---|---|---|---|---|---|
| | | | | Content | of genomic | |
| Plasmid/Sample ID | Plasmid/Sample Description | Linker Sequence | Notes on Linker | (%) | target sites | tgRNA |
| Mock | No Plasmid | N/A | N/A | N/A | N/A | N/A |
| pVT001 | nontargeting control (has SluCas9 and guide | N/A; not fused | N/A | N/A | N/A | N/A |
| | scaffold but spacer is nontargeting stuffer | | | | | |
| | sequence) | | | | | |
| pVT45 | nontargeting control (has SluCas9 and two | N/A; not fused | N/A | N/A | N/A | N/A |
| | guide scaffolds but spacers are nontargeting | | | | | |
| | stuffer sequences) | | | | | |
| pFGRNA17 | Fused guide RNA with Sl7 as first guide, | SEQ ID NO: 101 | original 20 nt linker | 30 | PAMout | 162 |
| | followed by 20 nt linker, and SL14 as the | | (v1 linker). | | | |
| | second guide. | | | | | |
| pFGRNA37 | Fused guide RNA with Sl7 as first guide, | SEQ ID NO: 104 | original 50 nt linker | 42 | PAMout | 163 |
| | followed by 50 nt linker, and SL14 as the | | | | | |
| | second guide. | | | | | |
| pFGRNA38 | Fused guide RNA with Sl7 as first guide, | SEQ ID NO: 105 | original 100 nt | 45 | PAMout | 164 |
| | followed by 100 nt linker, and SL14 as the | | linker | | | |
| | second guide. | | | | | |
| pFGRNA18 | Fused guide RNA with SL14 as first guide, | SEQ ID NO: 101 | original 20 nt linker | 30 | PAMout | 165 |
| | followed by 20 nt linker, and SL7 as the | | (v1 linker). | | | |
| | second guide. | | | | | |
| pFGRNA39 | Fused guide RNA with SL14 as first guide, | SEQ ID NO: 104 | original 50 nt linker | 42 | PAMout | 166 |
| | followed by 50 nt linker, and SL7 as the | | | | | |
| | second guide. | | | | | |
| pFGRNA40 | Fused guide RNA with SL14 as first guide, | SEQ ID NO: 105 | original 100 nt | 45 | PAMout | 167 |
| | followed by 100 nt linker, and SL7 as the | | linker | | | |
| | second guide. | | | | | |
| pFGRNA41 | Fused guide RNA with Sl5 as first guide, | SEQ ID NO: 101 | original 20 nt linker | 30 | PAMin | 168 |
| | followed by 20 nt linker, and SL23 as the | | (v1 linker). | | | |
| | second guide. | | | | | |
| pFGRNA42 | Fused guide RNA with Sl5 as first guide, | SEQ ID NO: 104 | original 50 nt linker | 42 | PAMin | 169 |
| | followed by 50 nt linker, and SL23 as the | | | | | |
| | second guide. | | | | | |
| pFGRNA43 | Fused guide RNA with Sl5 as first guide, | SEQ ID NO: 105 | original 100 nt | 45 | PAMin | 170 |
| | followed by 100 nt linker, and SL23 as the | | linker | | | |
| | second guide. | | | | | |
| pFGRNA44 | Fused guide RNA with Sl23 as first guide, | SEQ ID NO: 101 | original 20 nt linker | 30 | PAMin | 171 |
| | followed by 20 nt linker, and SL5 as the | | (v1 linker). | | | |
| | second guide. | | | | | |
| pFGRNA45 | Fused guide RNA with Sl23 as first guide, | SEQ ID NO: 104 | original 50 nt linker | 42 | PAMin | 172 |
| | followed by 50 nt linker, and SL5 as the | | | | | |
| | second guide. | | | | | |
| pFGRNA46 | Fused guide RNA with Sl23 as first guide, | SEQ ID NO: 105 | original 100 nt | 45 | PAMin | 173 |
| | followed by 100 nt linker, and SL5 as the | | linker | | | |
| | second guide. | | | | | |

TABLE 16
Structures and sequences of plasmids used in the experiments shown in FIG. 11. The Cas9 is SaCas9-KKH, and
a +1G was added to the U6 promoter transcriptional start site for all plasmids below (except the Mock).

| | | | | Linker GC | Orientation | |
|---|---|---|---|---|---|---|
| Plasmid/ | | | | Content | of genomic | |
| Sample ID | Plasmid/Sample Description | Linker Sequence | Notes on Linker | (%) | target sites | tgRNA |
| Mock | No Plasmid | N/A | N/A | N/A | N/A | N/A |
| pSaKKH- | nontargeting control (has SaCas9-KKH | N/A; not fused | N/A | N/A | N/A | N/A |
| Single Entry | and guide scaffold but spacer is | | | | | |
| | nontargeting stuffer sequence) | | | | | |
| pVT040 | nontargeting control (has SaCas9-KKH | N/A; not fused | N/A | N/A | N/A | N/A |
| | and two guide scaffolds but spacers are | | | | | |
| | nontargeting stuffer sequences) | | | | | |
| pFGRNA47 | Fused guide RNA with SaKKH23 as | SEQ ID NO: 101 | original 20 nt linker | 30 | PAMout | 174 |
| | first guide, followed by 20 nt linker, and | | (v1 linker) | | | |
| | SaKKH8 as the second guide. | | | | | |
| pFGRNA48 | Fused guide RNA with SaKKH8 as first | SEQ ID NO: 101 | original 20 nt linker | 30 | PAMout | 175 |
| | guide, followed by 20 nt linker, and | | (v1 linker) | | | |
| | SaKKH23 as the second guide. | | | | | |
| pFGRNA49 | Fused guide RNA with SaKKH29 as first | SEQ ID NO: 101 | original 20 nt linker | 30 | PAMin | 176 |
| | guide, followed by 20 nt linker, and | | (v1 linker) | | | |
| | SaKKH4 as the second guide. | | | | | |
| pFGRNA50 | Fused guide RNA with SaKKH4 as first | SEQ ID NO: 101 | original 20 nt linker | 30 | PAMin | 177 |
| | guide, followed by 20 nt linker, and | | (v1 linker) | | | |
| | SaKKH29 as the second guide. | | | | | |
| pFGRNA51 | Fused guide RNA with SaKKH24 as first | SEQ ID NO: 101 | original 20 nt linker | 30 | Tandem | 178 |
| | guide, followed by 20 nt linker, and | | (v1 linker) | | | |
| | SaKKH29 as the second guide. | | | | | |

2. Transfection of HEK293FT cells

### Day 1: Plate HEK293FT Cells

[0329] HEK293FT cells were rinsed with DPBS (Gibco). TrypLE Express (Gibco) was used to release cells from the flask. Cells were centrifuged at 150×g for 5 minutes, followed by resuspension in complete DMEM. Cells were then counted on a Countess II instrument (Invitrogen). Plated 30K cells/well in 96-well plates in 190 μL of complete media. The following reagents were used for cell passage: DPBS (-Ca/—Mg2) Gibco Catalog #14190-144, lot 2395065 and TrypLE Express (Gibco Catalog #12605-010, lot 2323075).

[0330] The composition of the media is described below:

| Complete Media | | Lot | Volume |
|---|---|---|---|
| Components (500 mL) | Supplier Catalog | number | used |
| DMEM (4.5g/L glucose) | Gibco 11960-051 | 2425336 | 435 ml |
| FBS-heat inactivated | Sigma F4135 | 20E043 | 50 ml |
| Glutamax | Gibco 350505-061 | 2323357 | 5 ml |
| 100x sodium pyruvate | Gibco 11360-070 | 2192805 | 5 ml |
| (1 mMfinal) | | | |
| 100x MEM Non-essential | Gibco 11140-050 | 2281492 | 5 ml |
| amino acids | | | |

Day 2: Transfect with Lipofectamine 3000

[0331] 200 ng plasmid per well of 96-well plate was used at a 1:1.5 DNA to lipofectamine 3000 (Invitrogen) ratio. The final transfection reaction per well was 10 μL volume. Every plasmid was transfected in triplicate; thus, 4× transfection mix was made for each plasmid. First, each plasmid was diluted to 100 ng/μL in opti-MEM [Gibco 11058021, lot 2323565]. Next, lipofectamine 3000 [lot 2413601] was diluted in opti-MEM and mixed well via a 2 second vortex. The following composition was achieved per well: 0.3 μL lipofectamine+4.7 μL opti-MEM per well. The mixture was diluted in bulk for all wells. Next, each plasmid was diluted in a final volume of 5 μL containing p3000 reagent and Opti-MEM, resulting in 200 ng (2 uL) plasmid+0.4 μL p3000+2.6 uL optimum per well. A p3000 reagent [lot 2413600] was used at ratio of 2 μL p3000/ug DNA. Fourth, diluted Lipofectamine 3000 (20 μL) was added to each diluted plasmid sample (20 μL) for a 4× transfection volume of each plasmid. The mixture was incubated for 10 minutes at room temperature. Fifth, 10 μL of transfection mix was added to each well. Three technical replicates were transfected for each plasmid. Additionally, a mock transfection was performed that includes Lipofectamine components, but no plasmid. Finally, the cell culture was continued for 72 hours post-transfection. At 72 hours, EGFP+ cells were imaged with an Evos M5000 microscope (Invitrogen).

3. gDNA Extraction and Amplicon Sequencing

[0332] gDNA Extraction: gDNA was collected from each well of the 96-well plate with the MagMAX DNA Ultra 2.0 Kit (Applied Biosystems) following manufacturer's protocol (at half recommended volumes). Processing was automated via a Kingfisher Apex (Thermo Fisher). gDNA was eluted in 60 μL of provided elution solution. A subset of gDNA elutions were quantified with a Qubit 4 (Thermo Fisher) using the 1×dsDNA Qubit High Sensitivity (HS) Kit (Thermo Fisher Catalog #Q33231) to estimate average gDNA concentrations.

[0333] Amplicon PCR and Purification: 5 μL of each gDNA was used to amplify the locus of interest. The PCR reaction components, L volumes, and thermocycler program are detailed below. The PCR primers were designed to be at least 80 nucleotides outside the closest Cas9 cut site, allowing for one amplicon to cover all targeted sites.

[0334] The following primers were used:

Forward:
(SEQ ID NO: 107)
TCGTCGGCAGCGTCAGATGTGTATAAGAGACAGgtctttctgtcttgta
tcctttgg
Reverse:
(SEQ ID NO: 108)
GTCTCGTGGGCTCGGAGATGTGTATAAGAGACAGaatgttagtgccttt
caccc

| Components | 1x (40 μL total) |
|---|---|
| 2X Q5 High-Fidelity Master Mix | 20 |
| Forward Primer (10 μM_ | 2 |
| Reverse Primer (10 μM) | 2 |
| gDNA | 5 |
| Nuclease-free water | 11 |
| Total | 40 |

| Steps/Cycles | Temperature | Time |
|---|---|---|
| Denaturation/1x | 98° C. | 2 min |
| Annealing/32x | 98° C. | 10 sec |
| | 64° C. | 30 sec |
| | 72° C. | 45 sec |
| Final Extensions/1x | 72° C. | 5 min |
| Hold | 4° C. | Pause/hold |

[0335] Amplicons were purified using AMPure XP beads (Beckman Coulter) at a volume ratio of 0.8×beads to PCR volume. Purification was automated via a Kingfisher Apex (Thermo Fisher). After binding PCR amplicons to the beads, beads were washed two times in 80% ethanol. Amplicons were eluted off beads with 50 μL of 0.1×TE buffer. Following the manufacturer's protocol, a D1000 ScreenTape (Agilent) was used to visualize the purified PCR amplicons (both full length amplicon and amplicons containing precise CleanCut deletions from Cas induced double strand breaks). A subset of amplicon samples was quantified with a Qubit 4 (Invitrogen) using the 1× dsDNA Qubit HS Kit (Invitrogen Q33231) to estimate average amplicon concentrations.

### 4. Sequencing and Inference of CRISPR Edits (ICE) Analysis

[0336] PCR amplicons were submitted to Azenta Life Sciences for sanger sequencing.

[0337] The sequencing primer is as follows: GTCTTTCTGTCTTGTATCCTTTGG (SEQ ID NO: 109).

[0338] An in-house ICE algorithm was utilized to analyze the abI trace files from Azenta. Each experimental sample was compared to the mock transfection for indel quantification. Mock transfections have no CRISPR reagents and will exhibit no CRISPR-induced editing. Indels were binned as CleanCut (precise deletion between the guide specified cut sites), Plus 1 (a single nucleotide insertion), or Other (all other detected indels). % Indels were plotted as mean±SD.

B. Methods for tgRNA Studies (Sl16/Sl23 and Sl7/Sl3)

[0339] Studies were carried out with the same general strategy outlined above but with the following modifications and additions for each section.

[0340] For the initial study, linkers shorter than 50 nucleotides were created by sequential removal of the centermost nucleotides to create linkers of 40, 30, 20, or 10 nucleotides while preserving linker/guide RNA junctions. tgRNAs with a 0 nt linker (direct connection between sgRNAs) were also created. Without wishing to be bound by theory, all linkers are hypothesized to be linear/minimally structured with the exception of the linkers containing TAR and P4-P6, which are RNA domains known to be structured and hypothesized to exhibit their native structure within the tgRNA. Additional 20-nucleotide linkers (Table 17) were also explored to assess different 20-nucleotide sequences with extended complementarity to the target DNA strand upstream of the second spacer within the fgRNA, and varying linker GC content. tgRNAs were also designed to compare use of SluCas9 v2 versus v5 scaffold sequences, and to assess the utility of adding a +1G nucleotide upstream of the tgRNA as the last nucleotide of the U6 transcriptional start site. tgRNAs were also designed to target sites in the genome in which the two protospacers are oriented to be PAMin, PAMout, or tandem, relative to the other paired target site.

TABLE 17

| Linker Description | Linker sequence (Plasmid DNA) |
|---|---|
| 0 nucleotide linker | No nucleotides were added in between the two guide RNAs |
| 10 nucleotide linker | TCTATTGACA (SEQ ID NO: 100) |
| 20 nucleotide linker | TCTATATGAGAAGAATGACA (SEQ ID NO: 101) |
| (original v1) | |
| 30 nucleotide linker | TCTATATGAGACCGACAATTAAGAATGACA (SEQ ID |
| | NO: 102) |
| 40 nucleotide linker | TCTATATGAGACCGACAATGCCCCACAATTAAGAA |
| | TGACA (SEQ ID NO: 103) |
| 50 nucleotide linker | TCTATATGAGACCGACAATGCAGCTGAGAACCCCA |
| | CAATTAAGAATGACA (SEQ ID NO: 104) |
| 20 nucleotide linker (v2) | AAGAATGACATCTATATGAG (SEQ ID NO: 112) |
| 20 nucleotide linker (v3) | GATACATAGAACATTCAACC (SEQ ID NO: 113) |
| 20 nucleotide linker (v4) | CGACTCAGCGCATCAAGATT (SEQ ID NO: 114) |
| TAR RNA with 10 nucleotide | TCTATATGAGGGGTCTCTCTAGTTAGACCAGATTTG |
| flanks | AGCCTGGGGGCTCTCTGGCTAGCTGGGGAACCCAC |
| | AAGAATGACA (SEQ ID NO: 115) |
| P4-P6 RNA with 10 nucleotide | TCTATATGAGGGAATTGCGGGAAAGGGGTCAACAG |
| flanks | CCGTTCAGTACCAAGTCTCAGGGGAAACTTTGAGA |
| | TGGCCTTGCAAAGGGTATGGTAATAAGCTGACGGA |
| | CATGGTCCTAACCACGCAGCCAAGTCCTAAGTCAA |
| | CAGATCTTCTGTTGATATGGATGCAGTTCAAGAATG |
| | ACA (SEQ ID NO: 116) |
| 20 nucleotide linker | TCTATATGAGAAGAATGATG (SEQ ID NO: 117) |
| (4 nucleotides complementary | |
| to genomic target at | |
| 3′ end of linker) | |
| 20 nucleotide linker | TCTATATGAGAAGAATAGTG (SEQ ID NO: 118) |
| (2 nucleotides complementary | |
| to genomic target at | |
| 3′ end of linker) | |
| 20 nucleotide linker (v5) | TATATATGAGAATAATTACA (SEQ ID NO: 119) |
| 20 nucleotide linker (v6) | TATATATTATAATAATTATA (SEQ ID NO: 120) |
| 100 nucleotide linker | TaCAATATgtaGGAGTGAGAGTGgTAaGGaCAtCAGcGa |
| | TTAGGACGAtaGGAaTTCAGGTaACggGCTTATACTGT |
| | cTGGTCATGACGAGGTAAAGgTg (SEQ ID NO: 105) |

[0341] Comparison plasmids expressing the two guides of interest from separate U6 promoters were also included in studies. These constructs included: p62 (S116 and Sl23 gRNAs) and p127 (Sl3 and S17 gRNAs). Additional control plasmids included pVT45 and pVT001, which were the parental plasmids containing SluCas9-T2A-EGFP and nontargeting gRNAs (pVT45 contained two nontargeting gRNAs, while pVT001 contained a single nontargeting gRNA). Nontargeting controls for SaCas9-KKH were pSaKKH-SingleEntry (the single nontargeting RNA control) and pVT040 (the dual nontargeting gRNA control).

### 1. Cell Culture and Transfection

[0342] HEK293FT cells were seeded at 200,000 cells per well in 12 well plates. The following day each well was transfected with 750 ng of plasmid using Lipofectamine 2000 (2.5 μl per well; Invitrogen) diluted in Opti-Mem I Reduced Serum Media (Gibco). 24 hours after transfection, media was replaced with fresh complete DMEM. Mock transfection consisted of Lipofectamine 2000 without plasmid. 293FT Complete Culture Media included: 425 mL DMEM High glucose (Gibco); 50 mL Heat-inactivated FBS (Sigma or Gibco); 5 mL Pen-Strep (10000U/mL stock; Sigma); 5 mL 100 mM Sodium Pyruvate (Gibco); 5 mL 100× Glutamax (Gibco); 5 mL 100×MEM Non-essential Amino Acids (NEAA; Gibco); and 5 mL 50 mg/mL Geneticin (Gibco).

### 2. FACS

[0343] Plasmids contained EGFP to allow for FACS of transfected cells to obtain a pure, transfected cell population (all EGFP+). FACS was performed on a Sony SH800 with 100 μM sorting chip. Cells were harvested and resuspended in 5% FBS in PBS solution for sorting. Mock (GFP−) and positive control cell samples were used to determine GFP+ gating. 100,000 cells were collected for each sample. Sorted cells were centrifuged, FACS buffer removed, and cell pellets stored at −20° C. until gDNA extraction. Alternatively, sorted cells (in 300 μL residual buffer) were directly used for gDNA extraction (detailed below), or the cells were directly sorted into lysis solution from the below described Promega DNA kit.

3. gDNA Extraction and Amplicon Sequencing

[0344] gDNA was extracted using Promega RSC Bood DNA Kit (Promega Catalog #ASB1400) following the manufacturer's protocol. Each cell sample was lysed in 300 μL lysis buffer, 30 μL Proteinase K, and 300 μL PBS. After a 30-minute incubation at 56° C., the entire 630 μL of lysis mixture was loaded into a maxwell cartridge. All gDNA samples were quantified using 1×dsDNA HS Quibit kit as described above on a Qubit 4 or Qubit Flex instrument. Each sample was then normalized to a specific concentration (usually 5 ng/μl gDNA). Primers, PCR reaction mix and thermocycler conditions are provided below.

### Primers:

MiSeq_hE53_F:
(SEQ ID NO: 110)
TCGTCGGCAGCGTCAGATGTGTATAAGAGACAGaaatgtgagataacgt
ttggaag
MiSeq_hE53_R:
(SEQ ID NO: 111)
GTCTCGTGGGCTCGGAGATGTGTATAAGAGACAGtttcagctttaacgt
gattttctg

| Component | 1X | Units | |
|---|---|---|---|
| Q5 Hot-Start High- | 25 | μL | |
| Fidelity Master Mix | | | |
| Forward Primer (10 μM) | 2.5 | μL | |
| Reverse Primer (10 μM) | 2.5 | μL | |
| gDNA (25-50 ng) | Experiment | μL | |
| | specific | | |
| Nuclease-free Water | Up to 50 μL | μL | |
| | total volume | | |
| Step | Temperature | Time | Cycles |
| Denaturation | 95° C. | 3 min | 1 |
| Annealing | 95° C. | 30 sec | 30-35 |
| | | | (experiment |
| | | | specific) |
| | 64° C. | 30 sec | |
| | 72° C. | 45 sec | |
| Final Extension | 72° C. | 5 min | 1 |
| Hold | 4° C. | Hold | N/A |

[0345] Amplicons were purified using AMPure XP beads (Beckman Coulter) at a volume ratio of 0.8× beads to PCR volume. Beads were incubated with PCR mix for 5 minutes before incubating on a 96 w magnetic stand for 5 minutes. Beads were washed 2-3× with 70% ethanol while on the magnet with 30 second incubations for each wash. The final wash was removed and beads were allowed to dry for 5 minutes. Plates were removed from magnetic stand and nuclease free water incubated on beads for 2 minutes. Plates were placed back on the magnet and eluate was transferred to a new plate. 5 μL of each amplicon was visualized on an Invitrogen E-gel to confirm amplification of desired amplicon size(s). Each PCR1 amplicon was quantified using a 1×dsDNA HS Qubit Kit (Invitrogen) as described above and normalized to a specific concentration for that experiment (generally 2 ng/μL).

### 4. PCR2 and Next Generation Sequencing Library Preparation

[0346] PCR2 reactions contained 2×Q5 Hot-Start High Fidelity Mastermix (NEB), PCR2 indexing primers, PCR1 template (8-10 ng, experiment specific), and water up to 50 μL final volume. PCR2 indexing primers were i5_UDP and i7_UDP sequences from Illumina. Thermocycler conditions are provided below.

| Step | Temperature | Time | Cycles |
|---|---|---|---|
| Denaturation | 95° C. | 3 min | 1 |
| Annealing | 95° C. | 30 sec | 10 |
| | 66° C. | 30 sec | |
| | 72° C. | 1 min | |
| Final Extension | 72° C. | 5 min | 1 |
| Hold | 4° C. | Hold | N/A |

[0347] PCR2 was AMPure bead purified and gel visualized as reported above for PCR1 methods. PCR2 amplicons were quantified with Qubit and normalized to 10 nM, and combined into a library. The library and PhiX Control v3 (Illumina) were diluted to 4 nM, denatured with NaOH, and further diluted to final loading concentrations of 6 pM or 8 pM. Final libraries containing 20-33% PhiX spike-in were loaded onto an Illumina 600 cycle Mi-Seq v3 cartridge.

### 5. Next Generation Sequencing (NGS) Analysis

[0348] VOnTarget, a computational tool developed in-house, was used to characterize and quantify on-target editing from the Illumina sequencing data. The VOnTarget workflow carries out several quality control steps prior to quantifying on-target editing rates. Briefly, paired-end FASTQ files were first filtered by mean quality and trimmed with trimmomatic to remove contaminating adapter sequences and low-quality bases. Contaminated reads that align to the PhiX genome with greater than 90% identity were discarded. The remaining paired-end reads were then merged using PEAR. These high-quality merged fragments were then aligned to three candidate amplicons (wild type unedited amplicon, amplicon with the precise dual-cut deletion between the 2 cut sites, and amplicon with an inversion of the sequence between the 2 cut sites) to capture expected edit events between the two sgRNA cut sites using Parasail.

[0349] Samples were discarded if they failed to meet any of the following QC criteria:
[0350] 1. Average base quality in the sample (Average Phred Q Score)>30, corresponding to <0.1% probability of an incorrect base call);
[0351] 2. Minimum fraction of reads remaining after removal of reads with average Phred Q Score<30 (>70% of all reads);
[0352] 3. Minimum fraction of reads with 75% of read length (226 bp) post-trimming (>65% of all reads);
[0353] 4. Minimum fraction of reads remaining removing PhiX reads (>65% of all reads);
[0354] 5. Minimum fraction of reads that successfully merged (>65% of all reads);
[0355] 6. Minimum fraction of reads that successfully aligned (>60% of all reads); or
[0356] 7. Minimum number of aligned reads (>20K).

[0357] For samples passing all QC criteria, alignments to the unedited and dual-cut deletion amplicons were classified in 3 categories based on the expected effect on the target gene's transcript:
[0358] 1. Precise deletion: editing events resulting from the excision of the sequence between the expected cut sites for each sample's treatment gRNA pair.
[0359] 2. Refraining edits: Indels other than precise deletion that reframe the transcript before truncation by a premature stop codon; includes single cut edits or imprecise dual cut deletions.
[0360] 3. Other edits: Indels that do not reframe the transcript.

[0361] For each sample, total percent editing and percent editing for each type of expected indels (precise deletion, refraining edits, other edits) were reported.

### C. Results

[0362] TgRNAs were selected for evaluation of indel frequency and profiling. Among this selection, 3 specific tandem sgRNA (in each orientation, for 6 total) were evaluated, along with pVT-49 (Slu 23-8), pVT-45 (dual parental), and pVT001 (single parental).

[0363] To evaluate indel frequency and editing profiles, PCR amplicons were visualized on a D1000 ScreenTape from Agilent Technologies (FIG. 1). As observed in FIG. 1, the majority of tgRNAs appeared to create deletions at the targeted locus. Full length amplicon was expected at 533 bp and was observed in all sample lanes. CleanCut deletion amplicons were expected at 366 bp (SEQ ID NOs: 234 and 239), 435 bp (SEQ ID NOs: 240 and 247), and 495 bp (SEQ ID NOs: 245 and 247). Each lane was a PCR amplicon from a single technical replicate of one biological replicate.

[0364] All Sl8/Sl23 tgRNAs (SEQ ID NOs: 234 and 239) were functional and created CleanCut deletions (green bars) and/or other indels (gray bars) as quantified by an ICE algorithm (FIG. 2B). tgRNAs in which the Sl8 sgRNA was placed before the Sl23 sgRNA were associated with a greater number of CleanCut deletions than tgRNAs in which the Sl23 sgRNA was placed before the Sl8 sgRNA. Thus, it appears that where the tgRNA is targeting sites that are tandem in the genome, arranging the order of the tgRNAs opposite the order of the nontarget genomic DNA strand may be most efficacious. pVT-49 expressing both gRNAs from separate U6 promoters also had observable editing as expected. Mock transfection and nontargeting control gRNA plasmids (pVT-45 and pVT001) were not expected to have editing activity at this locus. FIG. 2A shows the results in HEK293FT cells at 72 hours after plasmid transfection with Sl8/Sl23 tgRNAs and control plasmids. Transfected cells were expressing plasmid derived EGFP. All transfections were qualitatively similar except for Sl23-8fused 200 (including linker with SEQ ID NO: 106), which had fewer EGFP+ cells.

[0365] All Sl14/Sl21 tgRNAs (SEQ ID NOs: 240 and 247) were functional and created CleanCut deletions and/or other indels as quantified by an ICE algorithm (FIG. 3B). tgRNAs in which the Sl14 sgRNA was placed before the Sl21 sgRNA were associated with a greater number of CleanCut deletions than tgRNAs in which the Sl21 sgRNA was placed before the Sl14 sgRNA. Thus, it appears that where the tgRNA is targeting sites that are tandem in the genome, arranging the order of the tgRNAs opposite the order of the nontarget genomic DNA strand may be most efficacious. pVT-56 expressing both gRNAs from separate U6 promoters also had observable editing as expected. Mock transfection and nontargeting control gRNA plasmids (pVT-45 and pVT001) were not expected to have editing activity at this locus. FIG. 3A shows the results in HEK293FT cells at 72 hours after plasmid transfection with Sl14/Sl21 tgRNAs and control plasmids. Transfected cells expressed plasmid derived EGFP. Sl14-21fused100 showed fewer EGFP+ cells.

[0366] All Sl19/Sl21 tgRNAs (SEQ ID NOs: 245 and 247) were functional and created CleanCut deletions (green bars) and/or other indels (gray bars) as quantified by an ICE algorithm (FIG. 4B). tgRNAs in which the Sl19 sgRNA was placed before the Sl21 sgRNA were associated with a greater number of CleanCut deletions than tgRNAs in which the Sl21 sgRNA was placed before the Sl19 sgRNA. Thus, it appears that where the tgRNA is targeting sites that are tandem in the genome, arranging the order of the tgRNAs opposite the order of the nontarget genomic DNA strand may be most efficacious. pVT-61 expressing both gRNAs from separate U6 promoters also had observable editing as expected. Mock transfection and nontargeting control gRNA plasmids (pVT-45 and pVT001) were not expected to have editing activity at this locus. FIG. 4A shows the results in HEK293FT cells at 72 hours after plasmid transfection with Sl19/Sl21 tgRNAs and control plasmids. Transfected cells were expressing plasmid derived EGFP.

[0367] tgRNAs were tested with linkers of 0, 10, 20, 30, 40, and 50 nucleotides (SEQ ID NOs: 100-104), as shown in FIGS. 6A-B. The data suggest for this experiment that linkers of 10, 20, and 30 nucleotides appear equivalent to 2 individual guides for CleanCut. FIG. 6A shows that all Sl16/Sl23 tgRNAs (SEQ ID NOs: 384 and 391) were functional and created precise deletions (solid gray bars) as quantified by NGS data analysis. tgRNA constructs with linkers of 10-40 nucleotides were highly active, creating similar rates of precise deletion as p62, which expresses both gRNAs from separate U6 promoters. FIG. 6B shows that efficient precise deletion appears to require expression of the tgRNA transcript in its entirety. All Sl7/Sl3 fgRNA constructs resulted in minimal precise deletion rates.

[0368] Further analysis of Sl7/Sl3 fgRNA sequences revealed a TTTT DNA motif within the downstream Sl3 protospacer. It has been previously demonstrated that U6 promoter expression largely terminates at TTTT motifs (UUUU in the RNA transcript) (See Gao et al., Mol Ther Nucleic Acids. 2018, 10:36-44). Thus, without wishing to be bound by theory, it is possible that most Sl7/Sl3 tgRNA expression was terminated after the linker region and prior to the Sl3 sequence, resulting in minimal expression of the complete tgRNA transcript. p127 expressing both gRNAs from separate U6 promoters had strong precise deletion activity.

[0369] As shown in FIG. 7, tgRNAs were active with linkers that were predicted to be linear or structured. v1-v4 linkers were 20-nucleotide linkers that were predicted to be linear in the context of the larger tgRNA. pFGNRA25 with the v4 linker trended towards reduced precise deletion activity, which may possibly have been a result of the higher GC content of the v4 linear linker. tgRNA with structured linkers (TAR (Fulle et al., J. Chem. Inf. Model. 2010, 50(8):1489-1501) and P4-P6 (Bisaria et al., PNAS. 2016, 113(34):E4956-E4965)) also created precise deletions.

[0370] FIG. 8 shows further studies performed to elucidate individual variables' impact on tgRNA activity. All plotted pFGRNA constructs had a single variable different from the reference pFGRNA22 construct. pFGRNA28 and pFGRNA29 contained 20-nucleotide linkers with increased complementarity to the target DNA strand and exhibited equivalent precise deletion activity compared to pFGRNA22. pFGRNA30 had a 15% GC content linker and showed increased precise deletion activity compared to pFGRNA22, which had a 30% GC linker; however, pFGRNA31, which had no GC content in the linker sequence, had reduced precise deletion activity. pFGRNA constructs were active with v5 SluCas9 scaffolds (as in pFGRNA32) as well as with v2 SluCas9 scaffolds (all other plotted pFGRNA constructs). Additionally, SL16_23Fused20 (pFGRNA-minusG), which did not include addition of the +1G nucleotide as the last nucleotide of the U6 promoter transcriptional start site, exhibited increased precise deletion activity compared to the other plotted pFGRNA constructs that all contained+1G.

[0371] Without being bound by any particular theory, correlations of absence/presence of +1G and activity may be guide specific. If a guide already begins with G or A, the +1G may have a negative impact on activity. However, if a guide begins with T or C, the +1G may be beneficial for transcription levels. See Gao et al. (Transcription. 2017, 8(5):275-287), which showed that U6 transcripts that have T or C in the +1 position have reduced transcription compared to transcripts that have a G or A in the +1 position.

[0372] As shown in FIG. 9, tgRNAs containing v2 or v5 scaffolds were capable of creating precise deletions when paired with SluCas9. Additionally, tgRNAs were active when utilized with sRGN3.1 and sRGN3.3 endonucleases. FIG. 10 shows that SluCas9 with tgRNA was capable of creating precise deletions when targeted to genomic loci that are oriented to be PAMout or PAMin. Similar to tgRNA targeting tandem genomic sites (FIGS. 2B, 3B, 4B, 6A), shorter linker lengths resulted in higher precise deletion activities than longer linkers within a specific guide order. As shown in FIG. 11, SaCas9-KKH nuclease was capable of creating precise deletions with multiple tgRNAs irrespective of genomic orientation of target sites. All plotted pFGRNA constructs of FIG. 11 had a 20-nucleotide linker.

### Example 2: CRISPR/Cas9-Mediated Gene Editing

[0373] After testing the tgRNAs for both on-target activity and off-target activity, repeat expansion correction and whole gene correction strategies will be tested for HDR gene editing, including homologous recombination and heterologous insertion.

### 1. Homologous Recombination and Heterologous Insertion

[0374] Gene editing may be performed using homologous recombination, also known as gene replacement. Homologous recombination can be used to insert an exogenous polynucleotide sequence (“donor polynucleotide” or “donor sequence”) into the target nucleic acid cleavage site. The donor polynucleotide, a portion of the donor polynucleotide, a copy of the donor polynucleotide, or a portion of a copy of the donor polynucleotide can be inserted into the target nucleic acid cleavage site. The donor polynucleotide can be an exogenous polynucleotide sequence, i.e., a sequence that does not naturally occur at the target nucleic acid cleavage site. Homology directed repair is one strategy for treating patients that have premature stop codons due to small insertions/deletions or point mutations. In DMD, for example, rather than making a large genomic deletion that will convert a DMD phenotype to a BMD phenotype, this strategy will restore the entire reading frame and completely reverse the diseased state. This strategy will require a more custom approach based on the location of the patient's pre-mature stop. Most of the dystrophin exons are small (<300 bp). This is advantageous, as HDR efficiencies are inversely related to the size of the donor molecule. Also, it is expected that the donor templates can fit into size constrained adeno-associated virus (AAV) molecules, which have been shown to be an effective means of donor template delivery.

[0375] In such a method, the tgRNAs facilitate close proximity to the target strand to allow for insertion or deletion to occur. The modifications of the target gene due to NHEJ and/or HDR can lead to, for example, mutations, deletions, alterations, integrations, gene correction, gene replacement, gene tagging, transgene insertion, nucleotide deletion, gene disruption, translocations and/or gene mutation. The processes of deleting genomic DNA and integrating non-native nucleic acid into genomic DNA are examples of genome editing.

[0376] The tgRNAs will be further tested for heterologous insertions using DNA template sequences as known in the art and described herein. The template DNA may be delivered on a separate vector than the tgRNA. The template DNA may be delivered on the same vector as the tgRNA, or as part of the same composition.

2. Gene Correction or Insertion with tgRNA Localized Donor Template

[0377] Tandem guide RNAs (tgRNAs) are designed to contain two distinct spacers and target two genomic loci. It is proposed here that tgRNAs are also capable of localizing donor template to a Cas-induced double strand break at a tgRNA specified genomic locus to enable gene correction and/or insertion.

[0378] In the simplest context, one spacer sequence of the tgRNA will be designed to target the desired genomic locus and create a double strand break (DSB) while also targeting the donor with the second tgRNA spacer. Donor constructs may be linear DNA with Cas/tgRNA localizing the donor to the genomic DSB, or donors may be circularized with Cas/tgRNA functioning both to localize the donor to the genomic DSB and linearizing the donor template. Donors may have flanking regions of homologous sequence to the targeted genomic locus to enable homology directed repair. Alternatively, donors bearing no homology arms can be inserted into the genomic DSB via non homologous end joining. Moreover, there are multiple geometries to be explored such as a single tgRNA bridging between genome and donor (such as in FIG. 5A) or multiple tgRNA to allow creation of multiple double strand breaks (in genome and/or in donor) and additional bridging interactions between genome and donor (FIG. 5B).

[0379] tgRNA and donor-based gene correction/insertion will be characterized in a mammalian cell line with amplicon sequencing being utilized to detect the resultant donor integration or other indels at the targeted genomic locus. Both linear and circularized donors will be tested. Donors with and without homology arms will be explored. Editing reagents will be delivered as DNA sequences via transfection or viral transduction, or as RNP complexes via nucleofection. The Cas enzyme can also be delivered as mRNA.

What is claimed is:

1. A nucleic acid comprising a first sgRNA and a second sgRNA, wherein the first sgRNA and the second sgRNA are linked by a linker, and wherein the linker has a guanine and cytosine (GC) content of 5-37%, 5-30%, 5-25%, 5-20%, 10-37%, 10-35%, 10-30%, 10-25%, 10-20%, 15-40%, 15-35%, 15-30%, or 15-25%.

2. The nucleic acid of claim 1, wherein the linker is 10-30, 15-25, or 18-22 nucleotides in length.

3. The nucleic acid of claim 1 or claim 2, wherein the first sgRNA and the second sgRNA are for use with a SluCas9 endonuclease, optionally wherein the first sgRNA comprises the nucleotide sequence of SEQ ID NO: 384 and the second sgRNA comprises the nucleotide sequence of SEQ ID NO: 391 or SEQ ID NO: 249

4. A nucleic acid comprising a first sgRNA and a second sgRNA, wherein the first sgRNA and the second sgRNA are for use with a SluCas9 endonuclease, optionally wherein the first sgRNA comprises the nucleotide sequence of SEQ ID NO: 384 and the second sgRNA comprises the nucleotide sequence of SEQ ID NO: 391 or SEQ ID NO: 249.

5. The nucleic acid of claim 4, wherein the first sgRNA and the second sgRNA are linked by a linker.

6. The nucleic acid of claim 5, wherein the linker is greater than 16 nucleotides in length, optionally wherein the linker is 20 nucleotides in length.

7. The nucleic acid of any one of claims 1-6, wherein the linker comprises the sequence of SEQ ID NO: 119

8. The nucleic acid of any one of claims 1-7, wherein the first sgRNA comprises a first scaffold and the second sgRNA comprises a second scaffold, and wherein the first scaffold and the second scaffold are each capable of interacting with a SluCas9 endonuclease.

9. The nucleic acid of claim 8, wherein each of the first scaffold and the second scaffold are identical and comprise the nucleotide sequence of any one of SEQ ID NOs: 901-916.

10. The nucleic acid of any one of claims 1-9, wherein the nucleic acid does not comprise a guanine at the +1 position in a U6 transcriptional start site.

11. The nucleic acid of any one of claims 1-10, wherein
a. the linker connects the 3′ end of the first sgRNA to the 5′ end the second sgRNA.
b. the linker connects the 3′ end of the reverse complement of the first sgRNA to the 5′ end of the second sgRNA; or
c. the linker connects the 3′ end of the first sgRNA to the 5′ end of the reverse complement of the second sgRNA.

12. The nucleic acid of any one of claim 1-11, wherein the first sgRNA targets a genomic region that is downstream of the genomic region targeted by the second sgRNA.

13. A nucleic acid comprising a first single guide RNA (sgRNA) connected to a second sgRNA via a linker, wherein
a. the sgRNAs are for use with the same class, type, subtype, and/or species of endonuclease;
b. the first sgRNA targets a genomic region that is downstream of the genomic region targeted by the second sgRNA; and
c. the linker is greater than 16 nucleotides in length, optionally wherein the linker is 17-50, 17-35, 17-25, or 17-22 nucleotides in length.

14. The nucleic acid of any one of claims 4-13, wherein a guanine and cytosine (GC) content of the linker is 5-40%, 5-35%, 5-30%, 5-25%, 5-20%, 10-40%, 10-35%, 10-30%, 10-25%, 10-20%, 15-40%, 15-35%, 15-30%, or 15-25%.

15. A nucleic acid comprising a first single guide RNA (sgRNA) connected to a second sgRNA via a linker, wherein the sgRNAs are for use with the same class, type, subtype, and/or species of endonuclease.

16. A composition comprising the nucleic acid of claim 15 and optionally further comprising an endonuclease or a nucleic acid encoding an endonuclease.

17. The composition of claim 16, comprising a nucleic acid encoding an endonuclease, wherein the nucleic acid encoding the endonuclease and the two sgRNAs are on different vectors.

18. The composition of any one of claims 1-17, wherein the nucleic acid encoding the sgRNAs and/or the nucleic acid encoding the endonuclease, if present, are associated with a lipid nanoparticle (LNP), or a viral vector.

19. The composition of claim 18, wherein the nucleic acid encoding the sgRNAs and/or the nucleic acid encoding the endonuclease, if present, is associated with a viral vector, wherein the viral vector is an adeno-associated virus vector (AAV), a lentiviral vector, an integrase-deficient lentiviral vector, an adenoviral vector, a vaccinia viral vector, an alphaviral vector, or a herpes simplex viral vector.

20. The composition of claim 19, wherein the viral vector is an adeno-associated virus (AAV) vector.

21. The composition of claim 20, wherein the AAV vector is an AAV1, AAV2, AAV3, AAV4, AAV5, AAV6, AAV7, AAV8, or AAV9 vector, wherein the number following AAV indicates the AAV serotype.

22. The composition of claim 21, wherein the AAV vector is an AAV9 vector.

23. A composition comprising a nucleic acid comprising a first and a second sgRNA, wherein the sgRNAs are linked, and wherein the first sgRNA targets a location in a genome that is separated by about 150, 200, 250, 300, 350, 400, 450, 500, 600, 700, 800, 900, 1000, 2000, 3000, 4000, 5000, 6000, 7000, 8000, 9000, or 10000 nucleotides from the location targeted by the second sgRNA.

24. The composition of claim 23, wherein the first sgRNA targets a location in a genome that is separated by about 20-10,000, 20-5,000, 20-1,000, 20-500, 20-250, 50-10,000, 50-5,000, 50-1,000, 50-500, 50-250, 100-10,000, 100-1,000, 100-500, 100-250, 200-10,000, 200-5,000, 200-1,000, 200-500, 500-10,000, 500-5,000, 500-1,000, 1,000-10,000, 1,000-5,000, or 5,000-10,000 nucleotides from the location targeted by the second sgRNA.

25. The composition of any one of claims 1-24, wherein the linker connects the 3′ end of a first sgRNA to the 5′ end of a second sgRNA.

26. The composition of any one of claims 1-24, wherein the linker connects the 3′ end of the reverse complement of a first sgRNA to the 5′ end of a second sgRNA.

27. The composition of any one of claims 1-24, wherein the linker connects the 3′ end of a first sgRNA to the 5′ end of the reverse complement of a second sgRNA.

28. The composition of any one of claims 1-27, wherein the composition further comprises a template nucleic acid sequence.

29. A method of inserting a template DNA into genomic DNA comprising, administering to a cell the nucleic acid of any one of claims 1-15, or the composition of any one of claims 16 to 28, an endonuclease or a nucleic acid encoding an endonuclease, and a template nucleic acid, wherein the template nucleic acid is inserted into the genome.

30. The nucleic acid of any one of claims 1-15 or the composition of any one of claims 16 to 28, wherein the endonuclease is a Cas9 endonuclease.

31. The composition of claim 30, wherein the Cas9 nuclease is isolated or derived from Staphylococcus aureus (SaCas9) or Staphylococcus lugdunensis (SluCas9).

32. The nucleic acid of any one of claims 1-15 or the composition of any one of claims 16 to 28, wherein the linker is between 10 and 250 nucleotides.

33. The nucleic acid of any one of claims 1-15 or the composition of any one of claims 16 to 28, wherein the linker is about 50, about 100, or about 200 nucleotides.

34. The nucleic acid of any one of claims 1-15 or the composition of any one of claims 16 to 28, wherein the linker does not comprise a secondary structure.

35. The nucleic acid of any one of claims 1-15 or the composition of any one of claims 16 to 28, wherein the linker is not a structured linker.

36. The nucleic acid of any one of claims 1-15 or the composition of any one of claims 16 to 28, wherein the linker is shorter in nucleotide length than the nucleotide length between the region in the genome targeted by the first gRNA and the region in the genome targeted by the second gRNA.

37. The nucleic acid of any one of claims 1-15 or the composition of any one of claims 16 to 28, wherein the linker is greater in nucleotide length than the nucleotide length between the region in the genome targeted by the first gRNA and the region in the genome targeted by the second gRNA.

38. The nucleic acid of any one of claims 1-15 or the composition of any one of claims 16 to 28, wherein the linker comprises a ribozyme cleavage site.

39. The nucleic acid or composition of claim 38, wherein the ribozyme cleavage site is a hammerhead ribozyme cleavage site.

40. The nucleic acid of any one of claims 1-15 or the composition of any one of claims 16 to 28, wherein the linker comprises the sequence of any one of SEQ ID NO: 100 to 106, 112-14, or 117-120.

41. The nucleic acid of any one of claims 1-15 or the composition of any one of claims 16 to 28, wherein the first sgRNA targets a genomic region that is downstream of the genomic region targeted by the second sgRNA.

42. The nucleic acid of any one of claims 1-15 or the composition of any one of claims 16 to 28, wherein the second sgRNA targets a genomic region that is downstream of the genomic region targeted by the first sgRNA.

43. The nucleic acid of any one of claims 1-15 or the composition of any one of claims 16 to 28, wherein the first sgRNA comprises a first scaffold, wherein the second sgRNA comprises a second scaffold, and wherein the first scaffold and the second scaffold are capable of selectively interacting with the same class, type, subtype and/or species of endonuclease.

44. The nucleic acid or composition of claim 43, wherein the first scaffold nucleotide sequence differs from the second scaffold nucleotide sequence by no more than 1, 2, 3, 4, 5, 6, 7, 8, 9, or 10 nucleotides.

45. The nucleic acid or composition of claim 44, wherein the first scaffold nucleotide sequence is identical to the second scaffold nucleotide sequence.

46. The nucleic acid or composition of any one of claims 43-45, wherein the first scaffold and the second scaffold each comprise the nucleotide sequence of any one of SEQ ID Nos: 501-504, 601, or 900-917.

47. The nucleic acid or composition of any one of claims 43-46, wherein the first scaffold and the second scaffold each comprise the nucleotide sequence of SEQ ID NO: 901.

48. The nucleic acid of any one of claims 1-15 or the composition of any one of claims 16 to 47, wherein the first sgRNA and the second sgRNA are in the same orientation.

49. The nucleic acid of any one of claims 1-15 or the composition of any one of claims 16 to 47, wherein the first sgRNA and the second sgRNA are in opposite orientations.

50. The nucleic acid of any one of claims 1-15 or the composition of any one of claims 16 to 47, wherein the nucleic acid comprises from 5′ to 3′:
a. a promoter for expression of a first gRNA and a second gRNA, a first gRNA, a first gRNA scaffold, a linker, a second gRNA, a second gRNA scaffold;
b. a promoter for expression of a first gRNA and a second gRNA, the reverse complement of a first gRNA scaffold, the reverse complement of a first gRNA scaffold, a linker, a second gRNA, and a second gRNA scaffold;
c. a promoter for expression of a first gRNA and a second gRNA, a first gRNA, a first gRNA scaffold, a linker, the reverse complement of a second gRNA scaffold, and the reverse complement of a second gRNA scaffold;
d. a promoter for expression of an endonuclease, a gene encoding an endonuclease, a promoter for expression of a first gRNA and a second gRNA, a first gRNA, a first gRNA scaffold, a linker, a second gRNA, a second gRNA scaffold;
e. a promoter for expression of an endonuclease, a gene encoding an endonuclease, a promoter for expression of a first gRNA and a second gRNA, the reverse complement of a first gRNA scaffold, the reverse complement of a first gRNA scaffold, a linker, a second gRNA, and a second gRNA scaffold;
f. a promoter for expression of an endonuclease, a gene encoding an endonuclease, a promoter for expression of a first gRNA and a second gRNA, a first gRNA, a first gRNA scaffold, a linker, the reverse complement of a second gRNA scaffold, and the reverse complement of a second gRNA scaffold;
g. a promoter for expression of a first gRNA and a second gRNA, a first gRNA, a first gRNA scaffold, a linker, a second gRNA, a second gRNA scaffold, a promoter for expression of an endonuclease, a gene encoding an endonuclease;
h. a promoter for expression of a first gRNA and a second gRNA, the reverse complement of a first gRNA scaffold, the reverse complement of a first gRNA scaffold, a linker, a second gRNA, and a second gRNA scaffold, a promoter for expression of an endonuclease, a gene encoding an endonuclease;
i. a promoter for expression of a first gRNA and a second gRNA, a first gRNA, a first gRNA scaffold, a linker, the reverse complement of a second gRNA scaffold, and the reverse complement of a second gRNA scaffold, a promoter for expression of an endonuclease, a gene encoding an endonuclease;
j. the reverse complement of a gene encoding an endonuclease, the reverse complement of a promoter of a gene encoding an endonuclease, a promoter for expression of a first gRNA and a second gRNA, a first gRNA, a first gRNA scaffold, a linker, a second gRNA, a second gRNA scaffold;
k. the reverse complement of a gene encoding an endonuclease, the reverse complement of a promoter of a gene encoding an endonuclease, a promoter for expression of a first gRNA and a second gRNA, the reverse complement of a first gRNA scaffold, the reverse complement of a first gRNA scaffold, a linker, a second gRNA, and a second gRNA scaffold;
l. the reverse complement of a gene encoding an endonuclease, the reverse complement of a promoter of a gene encoding an endonuclease, a promoter for expression of a first gRNA and a second gRNA, a first gRNA, a first gRNA scaffold, a linker, the reverse complement of a second gRNA scaffold, and the reverse complement of a second gRNA scaffold;
m. a promoter for expression of a first gRNA and a second gRNA, a first gRNA, a first gRNA scaffold, a linker, a second gRNA, a second gRNA scaffold, the reverse complement of a gene encoding an endonuclease, the reverse complement of a promoter of a gene encoding an endonuclease;
n. a promoter for expression of a first gRNA and a second gRNA, the reverse complement of a first gRNA scaffold, the reverse complement of a first gRNA scaffold, a linker, a second gRNA, and a second gRNA scaffold, the reverse complement of a gene encoding an endonuclease, the reverse complement of a promoter of a gene encoding an endonuclease; or
o. a promoter for expression of a first gRNA and a second gRNA, a first gRNA, a first gRNA scaffold, a linker, the reverse complement of a second gRNA scaffold, and the reverse complement of a second gRNA scaffold, the reverse complement of a gene encoding an endonuclease, the reverse complement of a promoter of a gene encoding an endonuclease.

51. A composition comprising the nucleic acid of any one of claims 1-15, and optionally further comprising an endonuclease or a nucleic acid encoding an endonuclease, optionally wherein the endonuclease is a SluCas9 endonuclease or the nucleic acid encoding the endonuclease encodes a SluCas9 endonuclease.

52. The composition of claim 51, comprising a nucleic acid encoding a SluCas9 endonuclease, wherein the nucleic acid encoding the endonuclease and the nucleic acid encoding the first sgRNA and the second sgRNA are on different vectors.

53. The composition of claim 51 or claim 52, wherein the nucleic acid encoding the first sgRNA and the second sgRNA and/or the nucleic acid encoding the endonuclease, if present, are associated with a lipid nanoparticle (LNP), or a viral vector.

54. The composition of any one of claims 51-53, further comprising a template nucleic acid sequence.

55. A method of inserting a template DNA into genomic DNA comprising, administering to a cell the nucleic acid of any one of claims 1-15, or the composition of any one of claims 51-54, a SluCas9 endonuclease or a nucleic acid encoding a SluCas9 endonuclease, and a template nucleic acid, wherein the template nucleic acid is inserted into the genome.

56. The nucleic acid or composition of any one of claims 1-54, wherein the sgRNAs target any of exons 2, 3, 6, 9, 44, 45, 47, 48, 50, 51 or 53 of human DMD.

57. The nucleic acid or composition of any one of claims 1-54 wherein the two sgRNAs are capable of excising a DNA fragment from the DMD gene; wherein the DNA fragment is between 5 and 250 nucleotides in length.

58. The nucleic acid or composition of claim 57, wherein the excised DNA fragment does not comprise an entire exon of the DMD gene.

59. The nucleic acid or composition of any one of claims 1-58, wherein the linker is not cleaved or hydrolyzed.

60. A method for treating DMD or DM1 comprising administering a therapeutically effective amount of the nucleic acid or composition of any one of claims 1-54 to a subject having DMD or DM1.

61. The method of claim 60, wherein the sgRNAs target the DMPK gene.

62. The method of claim 60, wherein the sgRNAs are designed to excise CTG repeats.

63. The method of claim 60, wherein the sgRNAs target the dystrophin gene.

64. A method for treating a disease or disorder that would benefit from an excision of an exon, intron, or exon-intron junction comprising administering a therapeutically effective amount of the nucleic acid or composition of any one of claims 1-59 to a subject in need thereof.

65. The method of any one of claims 60-64, wherein less than 60%, 50%, 40%, 30%, 20%, 10%, 5%, 3%, 2%, or 1% of the nucleic acid is processed to separate the first sgRNA from the second sgRNA.

66. A nucleic acid comprising a first sgRNA and a second sgRNA, wherein the nucleic acid comprises a nucleotide sequence having at least 80%, at least 85%, at least 90%, at least 95%, at least 96%, at least 97%, at least 98%, at least 99%, or 100% sequence identity to any one of SEQ ID NOs: 121-154 or 157-178.

The application's sequence listing, which the Patent Office published only in electronic form, follows.

SEQUENCE LISTING (9063 sequences)

SEQ ID NO: 1-99 - skipped (99 entries)

SEQ ID NO: 100 - DNA, 10 bp, synthetic construct
  misc_feature 1..10: note = Synthetic: 10 nucleotide linker
  source 1..10: mol_type = other DNA
tctattgaca

SEQ ID NO: 101 - DNA, 20 bp, synthetic construct
  misc_feature 1..20: note = Synthetic: 20 nucleotide linker
  source 1..20: mol_type = other DNA
tctatatgagaagaatgaca

SEQ ID NO: 102 - DNA, 30 bp, synthetic construct
  misc_feature 1..30: note = Synthetic: 30 nucleotide linker
  source 1..30: mol_type = other DNA
tctatatgagaccgacaattaagaatgaca

SEQ ID NO: 103 - DNA, 40 bp, synthetic construct
  misc_feature 1..40: note = Synthetic: 40 nucleotide linker
  source 1..40: mol_type = other DNA
tctatatgagaccgacaatgccccacaattaagaatgaca

SEQ ID NO: 104 - DNA, 50 bp, synthetic construct
  misc_feature 1..50: note = Synthetic: 50 nucleotide linker
  source 1..50: mol_type = other DNA
tctatatgagaccgacaatgcagctgagaaccccacaattaagaatgaca

SEQ ID NO: 105 - DNA, 100 bp, synthetic construct
  misc_feature 1..100: note = Synthetic: 100 nucleotide linker
  source 1..100: mol_type = other DNA
tacaatatgtaggagtgagagtggtaaggacatcagcgattaggacgataggaattcaggtaacgggcttatactgtctggtcatgacgaggtaaaggtg

SEQ ID NO: 106 - DNA, 200 bp, synthetic construct
  misc_feature 1..200: note = Synthetic: 200 nucleotide linker
  source 1..200: mol_type = other DNA
ataacatgaaacattacacaatacacaatcataggttaccatgcttaccactctgcttaaactgccctctaataccttatcctactcagcttcagacatcgcactccactcgcataacagttacgcttcgactcagcgcatcaagataactctaccaacttcgtatagcaatattcaggtcgtcgaattccccacacgta

SEQ ID NO: 107 - DNA, 57 bp, synthetic construct
  misc_feature 1..57: note = Synthetic: Mi-seq- hEx45-F
  source 1..57: mol_type = other DNA
tcgtcggcagcgtcagatgtgtataagagacaggtctttctgtcttgtatcctttgg

SEQ ID NO: 108 - DNA, 54 bp, synthetic construct
  misc_feature 1..54: note = Synthetic: Mi-seq- hEx45-R
  source 1..54: mol_type = other DNA
gtctcgtgggctcggagatgtgtataagagacagaatgttagtgcctttcaccc

SEQ ID NO: 109 - DNA, 24 bp, synthetic construct
  misc_feature 1..24: note = Synthetic: Primer
  source 1..24: mol_type = other DNA
gtctttctgtcttgtatcctttgg

SEQ ID NO: 110 - DNA, 56 bp, synthetic construct
  misc_feature 1..56: note = Synthetic: MiSeq_hE53_F
  source 1..56: mol_type = other DNA
tcgtcggcagcgtcagatgtgtataagagacagaaatgtgagataacgtttggaag

SEQ ID NO: 111 - DNA, 58 bp, synthetic construct
  misc_feature 1..58: note = Synthetic: MiSeq_hE53_R
  source 1..58: mol_type = other DNA
gtctcgtgggctcggagatgtgtataagagacagtttcagctttaacgtgattttctg

SEQ ID NO: 112 - DNA, 20 bp, synthetic construct
  misc_feature 1..20: note = Synthetic: 20 nucleotide linker (v2)
  source 1..20: mol_type = other DNA
aagaatgacatctatatgag

SEQ ID NO: 113 - DNA, 20 bp, synthetic construct
  misc_feature 1..20: note = Synthetic: 20 nucleotide linker (v3)
  source 1..20: mol_type = other DNA
gatacatagaacattcaacc

SEQ ID NO: 114 - DNA, 20 bp, synthetic construct
  misc_feature 1..20: note = Synthetic: 20 nucleotide linker (v4)
  source 1..20: mol_type = other DNA
cgactcagcgcatcaagatt

SEQ ID NO: 115 - DNA, 81 bp, synthetic construct
  misc_feature 1..81: note = Synthetic: TAR RNA with 10 nucleotide flanks
  source 1..81: mol_type = other DNA
tctatatgaggggtctctctagttagaccagatttgagcctgggggctctctggctagctggggaacccacaagaatgaca

SEQ ID NO: 116 - DNA, 179 bp, synthetic construct
  misc_feature 1..179: note = Synthetic: P4-P6 RNA with 10 nucleotide flanks
  source 1..179: mol_type = other DNA
tctatatgagggaattgcgggaaaggggtcaacagccgttcagtaccaagtctcaggggaaactttgagatggccttgcaaagggtatggtaataagctgacggacatggtcctaaccacgcagccaagtcctaagtcaacagatcttctgttgatatggatgcagttcaagaatgaca

SEQ ID NO: 117 - DNA, 20 bp, synthetic construct
  misc_feature 1..20: note = Synthetic: 20 nucleotide linker(4 nucleotides complementary to genomic target at 3' end of linker)
  source 1..20: mol_type = other DNA
tctatatgagaagaatgatg

SEQ ID NO: 118 - DNA, 20 bp, synthetic construct
  misc_feature 1..20: note = Synthetic: 20 nucleotide linker(2 nucleotides complementary to genomic target at 3' end of linker)
  source 1..20: mol_type = other DNA
tctatatgagaagaatagtg

SEQ ID NO: 119 - DNA, 20 bp, synthetic construct
  misc_feature 1..20: note = Synthetic: 20 nucleotide linker (v5)
  source 1..20: mol_type = other DNA
tatatatgagaataattaca

SEQ ID NO: 120 - DNA, 20 bp, synthetic construct
  misc_feature 1..20: note = Synthetic: 20 nucleotide linker (v6)
  source 1..20: mol_type = other DNA
tatatattataataattata

SEQ ID NO: 121 - DNA, 273 bp, synthetic construct
  misc_feature 1..273: note = Synthetic: tgRNA
  source 1..273: mol_type = other DNA
gctgtcagacagaaaaaagagggtttaagtactctgtgctggaaacagcacagaatctactgaaacaagacaatatgtcgtgtttatcccatcaatttattggtgggatctatatgagaccgacaatgcagctgagaaccccacaattaagaatgacaggtatcttacaggaactccagggtttaagtactctgtgctggaaacagcacagaatctactgaaacaagacaatatgtcgtgtttatcccatcaatttattggtgggattttttt

SEQ ID NO: 122 - DNA, 323 bp, synthetic construct
  misc_feature 1..323: note = Synthetic: tgRNA
  source 1..323: mol_type = other DNA
gctgtcagacagaaaaaagagggtttaagtactctgtgctggaaacagcacagaatctactgaaacaagacaatatgtcgtgtttatcccatcaatttattggtgggatacaatatgtaggagtgagagtggtaaggacatcagcgattaggacgataggaattcaggtaacgggcttatactgtctggtcatgacgaggtaaaggtgggtatcttacaggaactccagggtttaagtactctgtgctggaaacagcacagaatctactgaaacaagacaatatgtcgtgtttatcccatcaatttattggtgggattttttt

SEQ ID NO: 123 - DNA, 423 bp, synthetic construct
  misc_feature 1..423: note = Synthetic: tgRNA
  source 1..423: mol_type = other DNA
gctgtcagacagaaaaaagagggtttaagtactctgtgctggaaacagcacagaatctactgaaacaagacaatatgtcgtgtttatcccatcaatttattggtgggaataacatgaaacattacacaatacacaatcataggttaccatgcttaccactctgcttaaactgccctctaataccttatcctactcagcttcagacatcgcactccactcgcataacagttacgcttcgactcagcgcatcaagataactctaccaacttcgtatagcaatattcaggtcgtcgaattccccacacgtaggtatcttacaggaactccagggtttaagtactctgtgctggaaacagcacagaatctactgaaacaagacaatatgtcgtgtttatcccatcaatttattggtgggattttttt

SEQ ID NO: 124 - DNA, 273 bp, synthetic construct
  misc_feature 1..273: note = Synthetic: tgRNA
  source 1..273: mol_type = other DNA
ggtatcttacaggaactccagggtttaagtactctgtgctggaaacagcacagaatctactgaaacaagacaatatgtcgtgtttatcccatcaatttattggtgggatctatatgagaccgacaatgcagctgagaaccccacaattaagaatgacagctgtcagacagaaaaaagagggtttaagtactctgtgctggaaacagcacagaatctactgaaacaagacaatatgtcgtgtttatcccatcaatttattggtgggattttttt

SEQ ID NO: 125 - DNA, 323 bp, synthetic construct
  misc_feature 1..323: note = Synthetic: tgRNA
  source 1..323: mol_type = other DNA
ggtatcttacaggaactccagggtttaagtactctgtgctggaaacagcacagaatctactgaaacaagacaatatgtcgtgtttatcccatcaatttattggtgggatacaatatgtaggagtgagagtggtaaggacatcagcgattaggacgataggaattcaggtaacgggcttatactgtctggtcatgacgaggtaaaggtggctgtcagacagaaaaaagagggtttaagtactctgtgctggaaacagcacagaatctactgaaacaagacaatatgtcgtgtttatcccatcaatttattggtgggattttttt

SEQ ID NO: 126 - DNA, 423 bp, synthetic construct
  misc_feature 1..423: note = Synthetic: tgRNA
  source 1..423: mol_type = other DNA
ggtatcttacaggaactccagggtttaagtactctgtgctggaaacagcacagaatctactgaaacaagacaatatgtcgtgtttatcccatcaatttattggtgggaataacatgaaacattacacaatacacaatcataggttaccatgcttaccactctgcttaaactgccctctaataccttatcctactcagcttcagacatcgcactccactcgcataacagttacgcttcgactcagcgcatcaagataactctaccaacttcgtatagcaatattcaggtcgtcgaattccccacacgtagctgtcagacagaaaaaagagggtttaagtactctgtgctggaaacagcacagaatctactgaaacaagacaatatgtcgtgtttatcccatcaatttattggtgggattttttt

SEQ ID NO: 127 - DNA, 273 bp, synthetic construct
  misc_feature 1..273: note = Synthetic: tgRNA
  source 1..273: mol_type = other DNA
gccagtattctacaggaaaaatgtttaagtactctgtgctggaaacagcacagaatctactgaaacaagacaatatgtcgtgtttatcccatcaatttattggtgggatctatatgagaccgacaatgcagctgagaaccccacaattaagaatgacatacaggaactccaggatggcatgtttaagtactctgtgctggaaacagcacagaatctactgaaacaagacaatatgtcgtgtttatcccatcaatttattggtgggattttttt

SEQ ID NO: 128 - DNA, 323 bp, synthetic construct
  misc_feature 1..323: note = Synthetic: tgRNA
  source 1..323: mol_type = other DNA
gccagtattctacaggaaaaatgtttaagtactctgtgctggaaacagcacagaatctactgaaacaagacaatatgtcgtgtttatcccatcaatttattggtgggatacaatatgtaggagtgagagtggtaaggacatcagcgattaggacgataggaattcaggtaacgggcttatactgtctggtcatgacgaggtaaaggtgtacaggaactccaggatggcatgtttaagtactctgtgctggaaacagcacagaatctactgaaacaagacaatatgtcgtgtttatcccatcaatttattggtgggattttttt

SEQ ID NO: 129 - DNA, 423 bp, synthetic construct
  misc_feature 1..423: note = Synthetic: tgRNA
  source 1..423: mol_type = other DNA
gccagtattctacaggaaaaatgtttaagtactctgtgctggaaacagcacagaatctactgaaacaagacaatatgtcgtgtttatcccatcaatttattggtgggaataacatgaaacattacacaatacacaatcataggttaccatgcttaccactctgcttaaactgccctctaataccttatcctactcagcttcagacatcgcactccactcgcataacagttacgcttcgactcagcgcatcaagataactctaccaacttcgtatagcaatattcaggtcgtcgaattccccacacgtatacaggaactccaggatggcatgtttaagtactctgtgctggaaacagcacagaatctactgaaacaagacaatatgtcgtgtttatcccatcaatttattggtgggattttttt

SEQ ID NO: 130 - DNA, 273 bp, synthetic construct
  misc_feature 1..273: note = Synthetic: tgRNA
  source 1..273: mol_type = other DNA
tacaggaactccaggatggcatgtttaagtactctgtgctggaaacagcacagaatctactgaaacaagacaatatgtcgtgtttatcccatcaatttattggtgggatctatatgagaccgacaatgcagctgagaaccccacaattaagaatgacagccagtattctacaggaaaaatgtttaagtactctgtgctggaaacagcacagaatctactgaaacaagacaatatgtcgtgtttatcccatcaatttattggtgggattttttt

SEQ ID NO: 131 - DNA, 323 bp, synthetic construct
  misc_feature 1..323: note = Synthetic: tgRNA
  source 1..323: mol_type = other DNA
tacaggaactccaggatggcatgtttaagtactctgtgctggaaacagcacagaatctactgaaacaagacaatatgtcgtgtttatcccatcaatttattggtgggatacaatatgtaggagtgagagtggtaaggacatcagcgattaggacgataggaattcaggtaacgggcttatactgtctggtcatgacgaggtaaaggtggccagtattctacaggaaaaatgtttaagtactctgtgctggaaacagcacagaatctactgaaacaagacaatatgtcgtgtttatcccatcaatttattggtgggattttttt

SEQ ID NO: 132 - DNA, 423 bp, synthetic construct
  misc_feature 1..423: note = Synthetic: tgRNA
  source 1..423: mol_type = other DNA
tacaggaactccaggatggcatgtttaagtactctgtgctggaaacagcacagaatctactgaaacaagacaatatgtcgtgtttatcccatcaatttattggtgggaataacatgaaacattacacaatacacaatcataggttaccatgcttaccactctgcttaaactgccctctaataccttatcctactcagcttcagacatcgcactccactcgcataacagttacgcttcgactcagcgcatcaagataactctaccaacttcgtatagcaatattcaggtcgtcgaattccccacacgtagccagtattctacaggaaaaatgtttaagtactctgtgctggaaacagcacagaatctactgaaacaagacaatatgtcgtgtttatcccatcaatttattggtgggattttttt

SEQ ID NO: 133 - DNA, 273 bp, synthetic construct
  misc_feature 1..273: note = Synthetic: tgRNA
  source 1..273: mol_type = other DNA
gttgtcagaacattgaatgcaagtttaagtactctgtgctggaaacagcacagaatctactgaaacaagacaatatgtcgtgtttatcccatcaatttattggtgggatctatatgagaccgacaatgcagctgagaaccccacaattaagaatgacatacaggaactccaggatggcatgtttaagtactctgtgctggaaacagcacagaatctactgaaacaagacaatatgtcgtgtttatcccatcaatttattggtgggattttttt

SEQ ID NO: 134 - DNA, 323 bp, synthetic construct
  misc_feature 1..323: note = Synthetic: tgRNA
  source 1..323: mol_type = other DNA
gttgtcagaacattgaatgcaagtttaagtactctgtgctggaaacagcacagaatctactgaaacaagacaatatgtcgtgtttatcccatcaatttattggtgggatacaatatgtaggagtgagagtggtaaggacatcagcgattaggacgataggaattcaggtaacgggcttatactgtctggtcatgacgaggtaaaggtgtacaggaactccaggatggcatgtttaagtactctgtgctggaaacagcacagaatctactgaaacaagacaatatgtcgtgtttatcccatcaatttattggtgggattttttt

SEQ ID NO: 135 - DNA, 423 bp, synthetic construct
  misc_feature 1..423: note = Synthetic: tgRNA
  source 1..423: mol_type = other DNA
gttgtcagaacattgaatgcaagtttaagtactctgtgctggaaacagcacagaatctactgaaacaagacaatatgtcgtgtttatcccatcaatttattggtgggaataacatgaaacattacacaatacacaatcataggttaccatgcttaccactctgcttaaactgccctctaataccttatcctactcagcttcagacatcgcactccactcgcataacagttacgcttcgactcagcgcatcaagataactctaccaacttcgtatagcaatattcaggtcgtcgaattccccacacgtatacaggaactccaggatggcatgtttaagtactctgtgctggaaacagcacagaatctactgaaacaagacaatatgtcgtgtttatcccatcaatttattggtgggattttttt

SEQ ID NO: 136 - DNA, 273 bp, synthetic construct
  misc_feature 1..273: note = Synthetic: tgRNA
  source 1..273: mol_type = other DNA
tacaggaactccaggatggcatgtttaagtactctgtgctggaaacagcacagaatctactgaaacaagacaatatgtcgtgtttatcccatcaatttattggtgggatctatatgagaccgacaatgcagctgagaaccccacaattaagaatgacagttgtcagaacattgaatgcaagtttaagtactctgtgctggaaacagcacagaatctactgaaacaagacaatatgtcgtgtttatcccatcaatttattggtgggattttttt

SEQ ID NO: 137 - DNA, 323 bp, synthetic construct
  misc_feature 1..323: note = Synthetic: tgRNA
  source 1..323: mol_type = other DNA
tacaggaactccaggatggcatgtttaagtactctgtgctggaaacagcacagaatctactgaaacaagacaatatgtcgtgtttatcccatcaatttattggtgggatacaatatgtaggagtgagagtggtaaggacatcagcgattaggacgataggaattcaggtaacgggcttatactgtctggtcatgacgaggtaaaggtggttgtcagaacattgaatgcaagtttaagtactctgtgctggaaacagcacagaatctactgaaacaagacaatatgtcgtgtttatcccatcaatttattggtgggattttttt

SEQ ID NO: 138 - DNA, 423 bp, synthetic construct
  misc_feature 1..423: note = Synthetic: tgRNA
  source 1..423: mol_type = other DNA
tacaggaactccaggatggcatgtttaagtactctgtgctggaaacagcacagaatctactgaaacaagacaatatgtcgtgtttatcccatcaatttattggtgggaataacatgaaacattacacaatacacaatcataggttaccatgcttaccactctgcttaaactgccctctaataccttatcctactcagcttcagacatcgcactccactcgcataacagttacgcttcgactcagcgcatcaagataactctaccaacttcgtatagcaatattcaggtcgtcgaattccccacacgtagttgtcagaacattgaatgcaagtttaagtactctgtgctggaaacagcacagaatctactgaaacaagacaatatgtcgtgtttatcccatcaatttattggtgggattttttt

SEQ ID NO: 139 - DNA, 273 bp, synthetic construct
  misc_feature 1..273: note = Synthetic: tgRNA
  source 1..273: mol_type = other DNA
aaggaagaagctgagcaggtctgtttaagtactctgtgctggaaacagcacagaatctactgaaacaagacaatatgtcgtgtttatcccatcaatttattggtgggatctatatgagaccgacaatgcagctgagaaccccacaattaagaatgacaaagtacaagaacaccttcagaagtttaagtactctgtgctggaaacagcacagaatctactgaaacaagacaatatgtcgtgtttatcccatcaatttattggtgggattttttt

SEQ ID NO: 140 - DNA, 263 bp, synthetic construct
  misc_feature 1..263: note = Synthetic: tgRNA
  source 1..263: mol_type = other DNA
aaggaagaagctgagcaggtctgtttaagtactctgtgctggaaacagcacagaatctactgaaacaagacaatatgtcgtgtttatcccatcaatttattggtgggatctatatgagaccgacaatgccccacaattaagaatgacaaagtacaagaacaccttcagaagtttaagtactctgtgctggaaacagcacagaatctactgaaacaagacaatatgtcgtgtttatcccatcaatttattggtgggattttttt

SEQ ID NO: 141 - DNA, 253 bp, synthetic construct
  misc_feature 1..253: note = Synthetic: tgRNA
  source 1..253: mol_type = other DNA
aaggaagaagctgagcaggtctgtttaagtactctgtgctggaaacagcacagaatctactgaaacaagacaatatgtcgtgtttatcccatcaatttattggtgggatctatatgagaccgacaattaagaatgacaaagtacaagaacaccttcagaagtttaagtactctgtgctggaaacagcacagaatctactgaaacaagacaatatgtcgtgtttatcccatcaatttattggtgggattttttt

SEQ ID NO: 142 - DNA, 243 bp, synthetic construct
  misc_feature 1..243: note = Synthetic: tgRNA
  source 1..243: mol_type = other DNA
aaggaagaagctgagcaggtctgtttaagtactctgtgctggaaacagcacagaatctactgaaacaagacaatatgtcgtgtttatcccatcaatttattggtgggatctatatgagaagaatgacaaagtacaagaacaccttcagaagtttaagtactctgtgctggaaacagcacagaatctactgaaacaagacaatatgtcgtgtttatcccatcaatttattggtgggattttttt

SEQ ID NO: 143 - DNA, 233 bp, synthetic construct
  misc_feature 1..233: note = Synthetic: tgRNA
  source 1..233: mol_type = other DNA
aaggaagaagctgagcaggtctgtttaagtactctgtgctggaaacagcacagaatctactgaaacaagacaatatgtcgtgtttatcccatcaatttattggtgggatctattgacaaagtacaagaacaccttcagaagtttaagtactctgtgctggaaacagcacagaatctactgaaacaagacaatatgtcgtgtttatcccatcaatttattggtgggattttttt

SEQ ID NO: 144 - DNA, 223 bp, synthetic construct
  misc_feature 1..223: note = Synthetic: tgRNA
  source 1..223: mol_type = other DNA
aaggaagaagctgagcaggtctgtttaagtactctgtgctggaaacagcacagaatctactgaaacaagacaatatgtcgtgtttatcccatcaatttattggtgggaaagtacaagaacaccttcagaagtttaagtactctgtgctggaaacagcacagaatctactgaaacaagacaatatgtcgtgtttatcccatcaatttattggtgggattttttt

SEQ ID NO: 145 - DNA, 273 bp, synthetic construct
  misc_feature 1..273: note = Synthetic: tgRNA
  source 1..273: mol_type = other DNA
acatttcattcaactgttgcctgtttaagtactctgtgctggaaacagcacagaatctactgaaacaagacaatatgtcgtgtttatcccatcaatttattggtgggatctatatgagaccgacaatgcagctgagaaccccacaattaagaatgacacttttggattgcatctactgtagtttaagtactctgtgctggaaacagcacagaatctactgaaacaagacaatatgtcgtgtttatcccatcaatttattggtgggattttttt

SEQ ID NO: 146 - DNA, 263 bp, synthetic construct
  misc_feature 1..263: note = Synthetic: tgRNA
  source 1..263: mol_type = other DNA
acatttcattcaactgttgcctgtttaagtactctgtgctggaaacagcacagaatctactgaaacaagacaatatgtcgtgtttatcccatcaatttattggtgggatctatatgagaccgacaatgccccacaattaagaatgacacttttggattgcatctactgtagtttaagtactctgtgctggaaacagcacagaatctactgaaacaagacaatatgtcgtgtttatcccatcaatttattggtgggattttttt

SEQ ID NO: 147 - DNA, 253 bp, synthetic construct
  misc_feature 1..253: note = Synthetic: tgRNA
  source 1..253: mol_type = other DNA
acatttcattcaactgttgcctgtttaagtactctgtgctggaaacagcacagaatctactgaaacaagacaatatgtcgtgtttatcccatcaatttattggtgggatctatatgagaccgacaattaagaatgacacttttggattgcatctactgtagtttaagtactctgtgctggaaacagcacagaatctactgaaacaagacaatatgtcgtgtttatcccatcaatttattggtgggattttttt

SEQ ID NO: 148 - DNA, 243 bp, synthetic construct
  misc_feature 1..243: note = Synthetic: tgRNA
  source 1..243: mol_type = other DNA
acatttcattcaactgttgcctgtttaagtactctgtgctggaaacagcacagaatctactgaaacaagacaatatgtcgtgtttatcccatcaatttattggtgggatctatatgagaagaatgacacttttggattgcatctactgtagtttaagtactctgtgctggaaacagcacagaatctactgaaacaagacaatatgtcgtgtttatcccatcaatttattggtgggattttttt

SEQ ID NO: 149 - DNA, 233 bp, synthetic construct
  misc_feature 1..233: note = Synthetic: tgRNA
  source 1..233: mol_type = other DNA
acatttcattcaactgttgcctgtttaagtactctgtgctggaaacagcacagaatctactgaaacaagacaatatgtcgtgtttatcccatcaatttattggtgggatctattgacacttttggattgcatctactgtagtttaagtactctgtgctggaaacagcacagaatctactgaaacaagacaatatgtcgtgtttatcccatcaatttattggtgggattttttt

SEQ ID NO: 150 - DNA, 223 bp, synthetic construct
  misc_feature 1..223: note = Synthetic: tgRNA
  source 1..223: mol_type = other DNA
acatttcattcaactgttgcctgtttaagtactctgtgctggaaacagcacagaatctactgaaacaagacaatatgtcgtgtttatcccatcaatttattggtgggacttttggattgcatctactgtagtttaagtactctgtgctggaaacagcacagaatctactgaaacaagacaatatgtcgtgtttatcccatcaatttattggtgggattttttt

SEQ ID NO: 151 - DNA, 244 bp, synthetic construct
  misc_feature 1..244: note = Synthetic: tgRNA
  source 1..244: mol_type = other DNA
gaaggaagaagctgagcaggtctgtttaagtactctgtgctggaaacagcacagaatctactgaaacaagacaatatgtcgtgtttatcccatcaatttattggtgggatctatatgagaagaatgacaaagtacaagaacaccttcagaagtttaagtactctgtgctggaaacagcacagaatctactgaaacaagacaatatgtcgtgtttatcccatcaatttattggtgggattttttt

SEQ ID NO: 152 - DNA, 244 bp, synthetic construct
  misc_feature 1..244: note = Synthetic: tgRNA
  source 1..244: mol_type = other DNA
gaaggaagaagctgagcaggtctgtttaagtactctgtgctggaaacagcacagaatctactgaaacaagacaatatgtcgtgtttatcccatcaatttattggtgggaaagaatgacatctatatgagaagtacaagaacaccttcagaagtttaagtactctgtgctggaaacagcacagaatctactgaaacaagacaatatgtcgtgtttatcccatcaatttattggtgggattttttt

SEQ ID NO: 153 - DNA, 244 bp, synthetic construct
  misc_feature 1..244: note = Synthetic: tgRNA
  source 1..244: mol_type = other DNA
gaaggaagaagctgagcaggtctgtttaagtactctgtgctggaaacagcacagaatctactgaaacaagacaatatgtcgtgtttatcccatcaatttattggtgggagatacatagaacattcaaccaagtacaagaacaccttcagaagtttaagtactctgtgctggaaacagcacagaatctactgaaacaagacaatatgtcgtgtttatcccatcaatttattggtgggattttttt

SEQ ID NO: 154 - DNA, 244 bp, synthetic construct
  misc_feature 1..244: note = Synthetic: tgRNA
  source 1..244: mol_type = other DNA
gaaggaagaagctgagcaggtctgtttaagtactctgtgctggaaacagcacagaatctactgaaacaagacaatatgtcgtgtttatcccatcaatttattggtgggacgactcagcgcatcaagattaagtacaagaacaccttcagaagtttaagtactctgtgctggaaacagcacagaatctactgaaacaagacaatatgtcgtgtttatcccatcaatttattggtgggattttttt

SEQ ID NO: 155 - DNA, 305 bp, synthetic construct
  misc_feature 1..305: note = Synthetic: tgRNA
  source 1..305: mol_type = other DNA
gaaggaagaagctgagcaggtctgtttaagtactctgtgctggaaacagcacagaatctactgaaacaagacaatatgtcgtgtttatcccatcaatttattggtgggatctatatgaggggtctctctagttagaccagatttgagcctgggggctctctggctagctggggaacccacaagaatgacaaagtacaagaacaccttcagaagtttaagtactctgtgctggaaacagcacagaatctactgaaacaagacaatatgtcgtgtttatcccatcaatttattggtgggattttttt

SEQ ID NO: 156 - DNA, 403 bp, synthetic construct
  misc_feature 1..403: note = Synthetic: tgRNA
  source 1..403: mol_type = other DNA
gaaggaagaagctgagcaggtctgtttaagtactctgtgctggaaacagcacagaatctactgaaacaagacaatatgtcgtgtttatcccatcaatttattggtgggatctatatgagggaattgcgggaaaggggtcaacagccgttcagtaccaagtctcaggggaaactttgagatggccttgcaaagggtatggtaataagctgacggacatggtcctaaccacgcagccaagtcctaagtcaacagatcttctgttgatatggatgcagttcaagaatgacaaagtacaagaacaccttcagaagtttaagtactctgtgctggaaacagcacagaatctactgaaacaagacaatatgtcgtgtttatcccatcaatttattggtgggattttttt

SEQ ID NO: 157 - DNA, 244 bp, synthetic construct
  misc_feature 1..244: note = Synthetic: tgRNA
  source 1..244: mol_type = other DNA
gaaggaagaagctgagcaggtctgtttaagtactctgtgctggaaacagcacagaatctactgaaacaagacaatatgtcgtgtttatcccatcaatttattggtgggatctatatgagaagaatgatgaagtacaagaacaccttcagaagtttaagtactctgtgctggaaacagcacagaatctactgaaacaagacaatatgtcgtgtttatcccatcaatttattggtgggattttttt

SEQ ID NO: 158 - DNA, 244 bp, synthetic construct
  misc_feature 1..244: note = Synthetic: tgRNA
  source 1..244: mol_type = other DNA
gaaggaagaagctgagcaggtctgtttaagtactctgtgctggaaacagcacagaatctactgaaacaagacaatatgtcgtgtttatcccatcaatttattggtgggatctatatgagaagaatagtgaagtacaagaacaccttcagaagtttaagtactctgtgctggaaacagcacagaatctactgaaacaagacaatatgtcgtgtttatcccatcaatttattggtgggattttttt

SEQ ID NO: 159 - DNA, 244 bp, synthetic construct
  misc_feature 1..244: note = Synthetic: tgRNA
  source 1..244: mol_type = other DNA
gaaggaagaagctgagcaggtctgtttaagtactctgtgctggaaacagcacagaatctactgaaacaagacaatatgtcgtgtttatcccatcaatttattggtgggatatatatgagaataattacaaagtacaagaacaccttcagaagtttaagtactctgtgctggaaacagcacagaatctactgaaacaagacaatatgtcgtgtttatcccatcaatttattggtgggattttttt

SEQ ID NO: 160 - DNA, 244 bp, synthetic construct
  misc_feature 1..244: note = Synthetic: tgRNA
  source 1..244: mol_type = other DNA
gaaggaagaagctgagcaggtctgtttaagtactctgtgctggaaacagcacagaatctactgaaacaagacaatatgtcgtgtttatcccatcaatttattggtgggatatatattataataattataaagtacaagaacaccttcagaagtttaagtactctgtgctggaaacagcacagaatctactgaaacaagacaatatgtcgtgtttatcccatcaatttattggtgggattttttt

SEQ ID NO: 161 - DNA, 226 bp, synthetic construct
  misc_feature 1..226: note = Synthetic: tgRNA
  source 1..226: mol_type = other DNA
gaaggaagaagctgagcaggtctgtttcagtactctggaaacagaatctactgaaacaagacaatatgtcgtgtttatcccatcaatttattggtgggattctatatgagaagaatgacaaagtacaagaacaccttcagaagtttcagtactctggaaacagaatctactgaaacaagacaatatgtcgtgtttatcccatcaatttattggtgggatttttttt

SEQ ID NO: 162 - DNA, 244 bp, synthetic construct
  misc_feature 1..244: note = Synthetic: tgRNA
  source 1..244: mol_type = other DNA
gacatttcattcaactgttgcctgtttaagtactctgtgctggaaacagcacagaatctactgaaacaagacaatatgtcgtgtttatcccatcaatttattggtgggatctatatgagaagaatgacaaggccagagccaagcttgagtcgtttaagtactctgtgctggaaacagcacagaatctactgaaacaagacaatatgtcgtgtttatcccatcaatttattggtgggattttttt

SEQ ID NO: 163 - DNA, 274 bp, synthetic construct
  misc_feature 1..274: note = Synthetic: tgRNA
  source 1..274: mol_type = other DNA
gacatttcattcaactgttgcctgtttaagtactctgtgctggaaacagcacagaatctactgaaacaagacaatatgtcgtgtttatcccatcaatttattggtgggatctatatgagaccgacaatgcagctgagaaccccacaattaagaatgacaaggccagagccaagcttgagtcgtttaagtactctgtgctggaaacagcacagaatctactgaaacaagacaatatgtcgtgtttatcccatcaatttattggtgggattttttt

SEQ ID NO: 164 - DNA, 324 bp, synthetic construct
  misc_feature 1..324: note = Synthetic: tgRNA
  source 1..324: mol_type = other DNA
gacatttcattcaactgttgcctgtttaagtactctgtgctggaaacagcacagaatctactgaaacaagacaatatgtcgtgtttatcccatcaatttattggtgggatacaatatgtaggagtgagagtggtaaggacatcagcgattaggacgataggaattcaggtaacgggcttatactgtctggtcatgacgaggtaaaggtgaggccagagccaagcttgagtcgtttaagtactctgtgctggaaacagcacagaatctactgaaacaagacaatatgtcgtgtttatcccatcaatttattggtgggattttttt

SEQ ID NO: 165 - DNA, 244 bp, synthetic construct
  misc_feature 1..244: note = Synthetic: tgRNA
  source 1..244: mol_type = other DNA
gaggccagagccaagcttgagtcgtttaagtactctgtgctggaaacagcacagaatctactgaaacaagacaatatgtcgtgtttatcccatcaatttattggtgggatctatatgagaagaatgacaacatttcattcaactgttgcctgtttaagtactctgtgctggaaacagcacagaatctactgaaacaagacaatatgtcgtgtttatcccatcaatttattggtgggattttttt

SEQ ID NO: 166 - DNA, 274 bp, synthetic construct
  misc_feature 1..274: note = Synthetic: tgRNA
  source 1..274: mol_type = other DNA
gaggccagagccaagcttgagtcgtttaagtactctgtgctggaaacagcacagaatctactgaaacaagacaatatgtcgtgtttatcccatcaatttattggtgggatctatatgagaccgacaatgcagctgagaaccccacaattaagaatgacaacatttcattcaactgttgcctgtttaagtactctgtgctggaaacagcacagaatctactgaaacaagacaatatgtcgtgtttatcccatcaatttattggtgggattttttt

SEQ ID NO: 167 - DNA, 324 bp, synthetic construct
  misc_feature 1..324: note = Synthetic: tgRNA
  source 1..324: mol_type = other DNA
gaggccagagccaagcttgagtcgtttaagtactctgtgctggaaacagcacagaatctactgaaacaagacaatatgtcgtgtttatcccatcaatttattggtgggatacaatatgtaggagtgagagtggtaaggacatcagcgattaggacgataggaattcaggtaacgggcttatactgtctggtcatgacgaggtaaaggtgacatttcattcaactgttgcctgtttaagtactctgtgctggaaacagcacagaatctactgaaacaagacaatatgtcgtgtttatcccatcaatttattggtgggattttttt

SEQ ID NO: 168 - DNA, 244 bp, synthetic construct
  misc_feature 1..244: note = Synthetic: tgRNA
  source 1..244: mol_type = other DNA
gaccctccttccatgactcaagcgtttaagtactctgtgctggaaacagcacagaatctactgaaacaagacaatatgtcgtgtttatcccatcaatttattggtgggatctatatgagaagaatgacaaagtacaagaacaccttcagaagtttaagtactctgtgctggaaacagcacagaatctactgaaacaagacaatatgtcgtgtttatcccatcaatttattggtgggattttttt

SEQ ID NO: 169 - DNA, 274 bp, synthetic construct
  misc_feature 1..274: note = Synthetic: tgRNA
  source 1..274: mol_type = other DNA
gaccctccttccatgactcaagcgtttaagtactctgtgctggaaacagcacagaatctactgaaacaagacaatatgtcgtgtttatcccatcaatttattggtgggatctatatgagaccgacaatgcagctgagaaccccacaattaagaatgacaaagtacaagaacaccttcagaagtttaagtactctgtgctggaaacagcacagaatctactgaaacaagacaatatgtcgtgtttatcccatcaatttattggtgggattttttt

SEQ ID NO: 170 - DNA, 324 bp, synthetic construct
  misc_feature 1..324: note = Synthetic: tgRNA
  source 1..324: mol_type = other DNA
gaccctccttccatgactcaagcgtttaagtactctgtgctggaaacagcacagaatctactgaaacaagacaatatgtcgtgtttatcccatcaatttattggtgggatacaatatgtaggagtgagagtggtaaggacatcagcgattaggacgataggaattcaggtaacgggcttatactgtctggtcatgacgaggtaaaggtgaagtacaagaacaccttcagaagtttaagtactctgtgctggaaacagcacagaatctactgaaacaagacaatatgtcgtgtttatcccatcaatttattggtgggattttttt

SEQ ID NO: 171 - DNA, 244 bp, synthetic construct
  misc_feature 1..244: note = Synthetic: tgRNA
  source 1..244: mol_type = other DNA
gaagtacaagaacaccttcagaagtttaagtactctgtgctggaaacagcacagaatctactgaaacaagacaatatgtcgtgtttatcccatcaatttattggtgggatctatatgagaagaatgacaaccctccttccatgactcaagcgtttaagtactctgtgctggaaacagcacagaatctactgaaacaagacaatatgtcgtgtttatcccatcaatttattggtgggattttttt

SEQ ID NO: 172 - DNA, 274 bp, synthetic construct
  misc_feature 1..274: note = Synthetic: tgRNA
  source 1..274: mol_type = other DNA
gaagtacaagaacaccttcagaagtttaagtactctgtgctggaaacagcacagaatctactgaaacaagacaatatgtcgtgtttatcccatcaatttattggtgggatctatatgagaccgacaatgcagctgagaaccccacaattaagaatgacaaccctccttccatgactcaagcgtttaagtactctgtgctggaaacagcacagaatctactgaaacaagacaatatgtcgtgtttatcccatcaatttattggtgggattttttt

SEQ ID NO: 173 - DNA, 324 bp, synthetic construct
  misc_feature 1..324: note = Synthetic: tgRNA
  source 1..324: mol_type = other DNA
gaagtacaagaacaccttcagaagtttaagtactctgtgctggaaacagcacagaatctactgaaacaagacaatatgtcgtgtttatcccatcaatttattggtgggatacaatatgtaggagtgagagtggtaaggacatcagcgattaggacgataggaattcaggtaacgggcttatactgtctggtcatgacgaggtaaaggtgaccctccttccatgactcaagcgtttaagtactctgtgctggaaacagcacagaatctactgaaacaagacaatatgtcgtgtttatcccatcaatttattggtgggattttttt

SEQ ID NO: 174 - DNA, 244 bp, synthetic construct
  misc_feature 1..244: note = Synthetic: tgRNA
  source 1..244: mol_type = other DNA
gtggaagctaaggaagaagctgagtttaagtactctgtgctggaaacagcacagaatctacttaaacaaggcaaaatgccgtgtttatctcgtcaacttgttggcgagatctatatgagaagaatgacacttgtacttcatcccactgattgtttaagtactctgtgctggaaacagcacagaatctacttaaacaaggcaaaatgccgtgtttatctcgtcaacttgttggcgagattttttt

SEQ ID NO: 175 - DNA, 244 bp, synthetic construct
  misc_feature 1..244: note = Synthetic: tgRNA
  source 1..244: mol_type = other DNA
gcttgtacttcatcccactgattgtttaagtactctgtgctggaaacagcacagaatctacttaaacaaggcaaaatgccgtgtttatctcgtcaacttgttggcgagatctatatgagaagaatgacatggaagctaaggaagaagctgagtttaagtactctgtgctggaaacagcacagaatctacttaaacaaggcaaaatgccgtgtttatctcgtcaacttgttggcgagattttttt

SEQ ID NO: 176 - DNA, 244 bp, synthetic construct
  misc_feature 1..244: note = Synthetic: tgRNA
  source 1..244: mol_type = other DNA
gaaagaattcagaatcagtgggagtttaagtactctgtgctggaaacagcacagaatctacttaaacaaggcaaaatgccgtgtttatctcgtcaacttgttggcgagatctatatgagaagaatgacatccttagcttccagccattgtggtttaagtactctgtgctggaaacagcacagaatctacttaaacaaggcaaaatgccgtgtttatctcgtcaacttgttggcgagattttttt

SEQ ID NO: 177 - DNA, 244 bp, synthetic construct
  misc_feature 1..244: note = Synthetic: tgRNA
  source 1..244: mol_type = other DNA
gtccttagcttccagccattgtggtttaagtactctgtgctggaaacagcacagaatctacttaaacaaggcaaaatgccgtgtttatctcgtcaacttgttggcgagatctatatgagaagaatgacaaaagaattcagaatcagtgggagtttaagtactctgtgctggaaacagcacagaatctacttaaacaaggcaaaatgccgtgtttatctcgtcaacttgttggcgagattttttt

SEQ ID NO: 178 - DNA, 244 bp, synthetic construct
  misc_feature 1..244: note = Synthetic: tgRNA
  source 1..244: mol_type = other DNA
gaatgaaatgttaaaggattcaagtttaagtactctgtgctggaaacagcacagaatctacttaaacaaggcaaaatgccgtgtttatctcgtcaacttgttggcgagatctatatgagaagaatgacaaaagaattcagaatcagtgggagtttaagtactctgtgctggaaacagcacagaatctacttaaacaaggcaaaatgccgtgtttatctcgtcaacttgttggcgagattttttt

SEQ ID NO: 179-199 - skipped (21 entries)

SEQ ID NO: 200 - DNA, 22 bp, synthetic construct
  misc_feature 1..22: note = Synthetic: E45Sa1
  source 1..22: mol_type = other DNA
tcaggcttcccaatttttcctg

SEQ ID NO: 201 - DNA, 22 bp, synthetic construct
  misc_feature 1..22: note = Synthetic: E45Sa2
  source 1..22: mol_type = other DNA
tagaatactggcatctgttttt

SEQ ID NO: 202 - DNA, 22 bp, synthetic construct
  misc_feature 1..22: note = Synthetic: E45Sa3
  source 1..22: mol_type = other DNA
tggcatctgtttttgaggattg

SEQ ID NO: 203 - DNA, 22 bp, synthetic construct
  misc_feature 1..22: note = Synthetic: E45Sa4
  source 1..22: mol_type = other DNA
ttgccgctgcccaatgccatcc

SEQ ID NO: 204 - DNA, 22 bp, synthetic construct
  misc_feature 1..22: note = Synthetic: E45Sa6
  source 1..22: mol_type = other DNA
tctacaggaaaaattgggaagc

SEQ ID NO: 205 - DNA, 22 bp, synthetic construct
  misc_feature 1..22: note = Synthetic: E45Sa7
  source 1..22: mol_type = other DNA
gcggcaaactgttgtcagaaca

SEQ ID NO: 206 - DNA, 22 bp, synthetic construct
  misc_feature 1..22: note = Synthetic: E45Sa8
  source 1..22: mol_type = other DNA
ttttggtatcttacaggaactc

SEQ ID NO: 207 - DNA, 22 bp, synthetic construct
  misc_feature 1..22: note = Synthetic: E45SaCas9KKH1
  source 1..22: mol_type = other DNA
tgtttgcagacctcctgccacc

SEQ ID NO: 208 - DNA, 22 bp, synthetic construct
  misc_feature 1..22: note = Synthetic: E45SaCas9KKH2
  source 1..22: mol_type = other DNA
ctgccaccgcagattcaggctt

SEQ ID NO: 209 - DNA, 22 bp, synthetic construct
  misc_feature 1..22: note = Synthetic: E45SaCas9KKH3
  source 1..22: mol_type = other DNA
tcaggcttcccaatttttcctg

SEQ ID NO: 210 - DNA, 22 bp, synthetic construct
  misc_feature 1..22: note = Synthetic: E45SaCas9KKH4
  source 1..22: mol_type = other DNA
tagaatactggcatctgttttt

SEQ ID NO: 211 - DNA, 22 bp, synthetic construct
  misc_feature 1..22: note = Synthetic: E45SaCas9KKH5
  source 1..22: mol_type = other DNA
tggcatctgtttttgaggattg

SEQ ID NO: 212 - DNA, 22 bp, synthetic construct
  misc_feature 1..22: note = Synthetic: E45SaCas9KKH6
  source 1..22: mol_type = other DNA
aggattgctgaattatttcttc

SEQ ID NO: 213 - DNA, 22 bp, synthetic construct
  misc_feature 1..22: note = Synthetic: E45SaCas9KKH7
  source 1..22: mol_type = other DNA
aattatttcttccccagttgca

SEQ ID NO: 214 - DNA, 22 bp, synthetic construct
  misc_feature 1..22: note = Synthetic: E45SaCas9KKH8
  source 1..22: mol_type = other DNA
cagttgcattcaatgttctgac

SEQ ID NO: 215 - DNA, 22 bp, synthetic construct
  misc_feature 1..22: note = Synthetic: E45SaCas9KKH9
  source 1..22: mol_type = other DNA
ttctgacaacagtttgccgctg

SEQ ID NO: 216 - DNA, 22 bp, synthetic construct
  misc_feature 1..22: note = Synthetic: E45SaCas9KKH10
  source 1..22: mol_type = other DNA
ttgccgctgcccaatgccatcc

SEQ ID NO: 217 - DNA, 22 bp, synthetic construct
  misc_feature 1..22: note = Synthetic: E45SaCas9KKH16
  source 1..22: mol_type = other DNA
aaacagctgtcagacagaaaaa

SEQ ID NO: 218 - DNA, 22 bp, synthetic construct
  misc_feature 1..22: note = Synthetic: E45SaCas9KKH17
  source 1..22: mol_type = other DNA
gaagcctgaatctgcggtggca

SEQ ID NO: 219 - DNA, 22 bp, synthetic construct
  misc_feature 1..22: note = Synthetic: E45SaCas9KKH18
  source 1..22: mol_type = other DNA
gaaaaattgggaagcctgaatc

SEQ ID NO: 220 - DNA, 22 bp, synthetic construct
  misc_feature 1..22: note = Synthetic: E45SaCas9KKH19
  source 1..22: mol_type = other DNA
tctacaggaaaaattgggaagc

SEQ ID NO: 221 - DNA, 22 bp, synthetic construct
  misc_feature 1..22: note = Synthetic: E45SaCas9KKH20
  source 1..22: mol_type = other DNA
acagatgccagtattctacagg

SEQ ID NO: 222 - DNA, 22 bp, synthetic construct
  misc_feature 1..22: note = Synthetic: E45SaCas9KKH21
  source 1..22: mol_type = other DNA
tcagcaatcctcaaaaacagat

SEQ ID NO: 223 - DNA, 22 bp, synthetic construct
  misc_feature 1..22: note = Synthetic: E45SaCas9KKH22
  source 1..22: mol_type = other DNA
aataattcagcaatcctcaaaa

SEQ ID NO: 224 - DNA, 22 bp, synthetic construct
  misc_feature 1..22: note = Synthetic: E45SaCas9KKH23
  source 1..22: mol_type = other DNA
gcaactggggaagaaataattc

SEQ ID NO: 225 - DNA, 22 bp, synthetic construct
  misc_feature 1..22: note = Synthetic: E45SaCas9KKH24
  source 1..22: mol_type = other DNA
cattgaatgcaactggggaaga

SEQ ID NO: 226 - DNA, 22 bp, synthetic construct
  misc_feature 1..22: note = Synthetic: E45SaCas9KKH25
  source 1..22: mol_type = other DNA
gaacattgaatgcaactgggga

SEQ ID NO: 227 - DNA, 22 bp, synthetic construct
  misc_feature 1..22: note = Synthetic: E45SaCas9KKH26
  source 1..22: mol_type = other DNA
gcggcaaactgttgtcagaaca

SEQ ID NO: 228 - DNA, 22 bp, synthetic construct
  misc_feature 1..22: note = Synthetic: E45SaCas9KKH27
  source 1..22: mol_type = other DNA
ttttggtatcttacaggaactc

SEQ ID NO: 229 - DNA, 22 bp, synthetic construct
  misc_feature 1..22: note = Synthetic: E45Slu1
  source 1..22: mol_type = other DNA
agacctcctgccaccgcagatt

SEQ ID NO: 230 - DNA, 22 bp, synthetic construct
  misc_feature 1..22: note = Synthetic: E45Slu2
  source 1..22: mol_type = other DNA
tcccaatttttcctgtagaata

SEQ ID NO: 231 - DNA, 22 bp, synthetic construct
  misc_feature 1..22: note = Synthetic: E45Slu3
  source 1..22: mol_type = other DNA
tagaatactggcatctgttttt

SEQ ID NO: 232 - DNA, 22 bp, synthetic construct
  misc_feature 1..22: note = Synthetic: E45Slu4
  source 1..22: mol_type = other DNA
tttgccgctgcccaatgccatc

SEQ ID NO: 233 - DNA, 22 bp, synthetic construct
  misc_feature 1..22: note = Synthetic: E45Slu7
  source 1..22: mol_type = other DNA
ctgtcagacagaaaaaagaggt

SEQ ID NO: 234 - DNA, 22 bp, synthetic construct
  misc_feature 1..22: note = Synthetic: E45Slu8
  source 1..22: mol_type = other DNA
gctgtcagacagaaaaaagagg

SEQ ID NO: 235 - DNA, 22 bp, synthetic construct
  misc_feature 1..22: note = Synthetic: E45Slu9
  source 1..22: mol_type = other DNA
aacagctgtcagacagaaaaaa

SEQ ID NO: 236 - DNA, 22 bp, synthetic construct
  misc_feature 1..22: note = Synthetic: E45Slu10
  source 1..22: mol_type = other DNA
aagcctgaatctgcggtggcag

SEQ ID NO: 237 - DNA, 22 bp, synthetic construct
  misc_feature 1..22: note = Synthetic: E45Slu11
  source 1..22: mol_type = other DNA
gggaagcctgaatctgcggtgg

SEQ ID NO: 238 - DNA, 22 bp, synthetic construct
  misc_feature 1..22: note = Synthetic: E45Slu12
  source 1..22: mol_type = other DNA
aattgggaagcctgaatctgcg

SEQ ID NO: 239 - DNA, 22 bp, synthetic construct
  misc_feature 1..22: note = Synthetic: E45Slu13
  source 1..22: mol_type = other DNA
aaaaattgggaagcctgaatct

SEQ ID NO: 240 - DNA, 22 bp, synthetic construct
  misc_feature 1..22: note = Synthetic: E45Slu14
  source 1..22: mol_type = other DNA
gccagtattctacaggaaaaat

SEQ ID NO: 241 - DNA, 22 bp, synthetic construct
  misc_feature 1..22: note = Synthetic: E45Slu15
  source 1..22: mol_type = other DNA
tgccagtattctacaggaaaaa

SEQ ID NO: 242 - DNA, 22 bp, synthetic construct
  misc_feature 1..22: note = Synthetic: E45Slu16
  source 1..22: mol_type = other DNA
aaaaacagatgccagtattcta

SEQ ID NO: 243 - DNA, 22 bp, synthetic construct
  misc_feature 1..22: note = Synthetic: E45Slu17
  source 1..22: mol_type = other DNA
tgtcagaacattgaatgcaact

SEQ ID NO: 244 - DNA, 22 bp, synthetic construct
  misc_feature 1..22: note = Synthetic: E45Slu18
  source 1..22: mol_type = other DNA
ttgtcagaacattgaatgcaac

SEQ ID NO: 245 - DNA, 22 bp, synthetic construct
  misc_feature 1..22: note = Synthetic: E45Slu19
  source 1..22: mol_type = other DNA
gttgtcagaacattgaatgcaa

SEQ ID NO: 246 - DNA, 22 bp, synthetic construct
  misc_feature 1..22: note = Synthetic: E45Slu20
  source 1..22: mol_type = other DNA
aactccaggatggcattgggca

SEQ ID NO: 247 - DNA, 22 bp, synthetic construct
  misc_feature 1..22: note = Synthetic: E45Slu21
  source 1..22: mol_type = other DNA
tacaggaactccaggatggcat

SEQ ID NO: 248 - DNA, 22 bp, synthetic construct
  misc_feature 1..22: note = Synthetic: E45Slu22
  source 1..22: mol_type = other DNA
ttacaggaactccaggatggca

SEQ ID NO: 249 - DNA, 22 bp, synthetic construct
  misc_feature 1..22: note = Synthetic: E45Slu23
  source 1..22: mol_type = other DNA
ggtatcttacaggaactccagg

SEQ ID NO: 250 - DNA, 22 bp, synthetic construct
  misc_feature 1..22: note = Synthetic: E45Slu24
  source 1..22: mol_type = other DNA
ttttggtatcttacaggaactc

SEQ ID NO: 251 - DNA, 22 bp, synthetic construct
  misc_feature 1..22: note = Synthetic: E51Sa1
  source 1..22: mol_type = other DNA
tagtaaccacaggttgtgtcac

SEQ ID NO: 252 - DNA, 22 bp, synthetic construct
  misc_feature 1..22: note = Synthetic: E51Sa2
  source 1..22: mol_type = other DNA
gttgtgtcaccagagtaacagt

SEQ ID NO: 253 - DNA, 22 bp, synthetic construct
  misc_feature 1..22: note = Synthetic: E51Sa4
  source 1..22: mol_type = other DNA
gagggtgatggtgggtgacctt

SEQ ID NO: 254 - DNA, 22 bp, synthetic construct
  misc_feature 1..22: note = Synthetic: E51Sa5
  source 1..22: mol_type = other DNA
tataaaatcacagagggtgatg

SEQ ID NO: 255 - DNA, 22 bp, synthetic construct
  misc_feature 1..22: note = Synthetic: E51Sa6
  source 1..22: mol_type = other DNA
ttgatcaagttataaaatcaca

SEQ ID NO: 256 - DNA, 22 bp, synthetic construct
  misc_feature 1..22: note = Synthetic: E51SaCas9KKH1
  source 1..22: mol_type = other DNA
tcattttttctcataccttctg

SEQ ID NO: 257 - DNA, 22 bp, synthetic construct
  misc_feature 1..22: note = Synthetic: E51SaCas9KKH2
  source 1..22: mol_type = other DNA
ttttttctcataccttctgctt

SEQ ID NO: 258 - DNA, 22 bp, synthetic construct
  misc_feature 1..22: note = Synthetic: E51SaCas9KKH3
  source 1..22: mol_type = other DNA
ccttctgcttgatgatcatctc

SEQ ID NO: 259 - DNA, 22 bp, synthetic construct
  misc_feature 1..22: note = Synthetic: E51SaCas9KKH4
  source 1..22: mol_type = other DNA
atgatcatctcgttgatatcct

SEQ ID NO: 260 - DNA, 22 bp, synthetic construct
  misc_feature 1..22: note = Synthetic: E51SaCas9KKH5
  source 1..22: mol_type = other DNA
aaggtcacccaccatcaccctc

SEQ ID NO: 261 - DNA, 22 bp, synthetic construct
  misc_feature 1..22: note = Synthetic: E51SaCas9KKH6
  source 1..22: mol_type = other DNA
atcaccctctgtgattttataa

SEQ ID NO: 262 - DNA, 22 bp, synthetic construct
  misc_feature 1..22: note = Synthetic: E51SaCas9KKH7
  source 1..22: mol_type = other DNA
ataacttgatcaagcagagaaa

SEQ ID NO: 263 - DNA, 22 bp, synthetic construct
  misc_feature 1..22: note = Synthetic: E51SaCas9KKH8
  source 1..22: mol_type = other DNA
cttgatcaagcagagaaagcca

SEQ ID NO: 264 - DNA, 22 bp, synthetic construct
  misc_feature 1..22: note = Synthetic: E51SaCas9KKH9
  source 1..22: mol_type = other DNA
atcaagcagagaaagccagtcg

SEQ ID NO: 265 - DNA, 22 bp, synthetic construct
  misc_feature 1..22: note = Synthetic: E51SaCas9KKH10
  source 1..22: mol_type = other DNA
cagtcggtaagttctgtccaag

SEQ ID NO: 266 - DNA, 22 bp, synthetic construct
  misc_feature 1..22: note = Synthetic: E51SaCas9KKH11
  source 1..22: mol_type = other DNA
gtaagttctgtccaagcccggt

SEQ ID NO: 267 - DNA, 22 bp, synthetic construct
  misc_feature 1..22: note = Synthetic: E51SaCas9KKH12
  source 1..22: mol_type = other DNA
agcccggttgaaatctgccaga

SEQ ID NO: 268 - DNA, 22 bp, synthetic construct
  misc_feature 1..22: note = Synthetic: E51SaCas9KKH13
  source 1..22: mol_type = other DNA
agcaggtacctccaacatcaag

SEQ ID NO: 269 - DNA, 22 bp, synthetic construct
  misc_feature 1..22: note = Synthetic: E51SaCas9KKH14
  source 1..22: mol_type = other DNA
caacatcaaggaagatggcatt

SEQ ID NO: 270 - DNA, 22 bp, synthetic construct
  misc_feature 1..22: note = Synthetic: E51SaCas9KKH15
  source 1..22: mol_type = other DNA
aggaagatggcatttctagttt

SEQ ID NO: 271 - DNA, 22 bp, synthetic construct
  misc_feature 1..22: note = Synthetic: E51SaCas9KKH16
  source 1..22: mol_type = other DNA
atggcatttctagtttggagat

SEQ ID NO: 272 - DNA, 22 bp, synthetic construct
  misc_feature 1..22: note = Synthetic: E51SaCas9KKH17
  source 1..22: mol_type = other DNA
ctagtttggagatggcagtttc

SEQ ID NO: 273 - DNA, 22 bp, synthetic construct
  misc_feature 1..22: note = Synthetic: E51SaCas9KKH18
  source 1..22: mol_type = other DNA
gatggcagtttccttagtaacc

SEQ ID NO: 274 - DNA, 22 bp, synthetic construct
  misc_feature 1..22: note = Synthetic: E51SaCas9KKH19
  source 1..22: mol_type = other DNA
tagtaaccacaggttgtgtcac

SEQ ID NO: 275 - DNA, 22 bp, synthetic construct
  misc_feature 1..22: note = Synthetic: E51SaCas9KKH20
  source 1..22: mol_type = other DNA
ccacaggttgtgtcaccagagt

SEQ ID NO: 276 - DNA, 22 bp, synthetic construct
  misc_feature 1..22: note = Synthetic: E51SaCas9KKH21
  source 1..22: mol_type = other DNA
gttgtgtcaccagagtaacagt

SEQ ID NO: 277 - DNA, 22 bp, synthetic construct
  misc_feature 1..22: note = Synthetic: E51SaCas9KKH22
  source 1..22: mol_type = other DNA
gagtaacagtctgagtaggagc

SEQ ID NO: 278 - DNA, 22 bp, synthetic construct
  misc_feature 1..22: note = Synthetic: E51SaCas9KKH23
  source 1..22: mol_type = other DNA
tctgagtaggagctaaaatatt

SEQ ID NO: 279 - DNA, 22 bp, synthetic construct
  misc_feature 1..22: note = Synthetic: E51SaCas9KKH24
  source 1..22: mol_type = other DNA
agaaggtatgagaaaaaatgat

SEQ ID NO: 280 - DNA, 22 bp, synthetic construct
  misc_feature 1..22: note = Synthetic: E51SaCas9KKH25
  source 1..22: mol_type = other DNA
tcaagcagaaggtatgagaaaa

SEQ ID NO: 281 - DNA, 22 bp, synthetic construct
  misc_feature 1..22: note = Synthetic: E51SaCas9KKH26
  source 1..22: mol_type = other DNA
tcatcaagcagaaggtatgaga

SEQ ID NO: 282 - DNA, 22 bp, synthetic construct
  misc_feature 1..22: note = Synthetic: E51SaCas9KKH27
  source 1..22: mol_type = other DNA
tcaacgagatgatcatcaagca

SEQ ID NO: 283 - DNA, 22 bp, synthetic construct
  misc_feature 1..22: note = Synthetic: E51SaCas9KKH28
  source 1..22: mol_type = other DNA
gtgaccttgaggatatcaacga

SEQ ID NO: 284 - DNA, 22 bp, synthetic construct
  misc_feature 1..22: note = Synthetic: E51SaCas9KKH29
  source 1..22: mol_type = other DNA
tgggtgaccttgaggatatcaa

SEQ ID NO: 285 - DNA, 22 bp, synthetic construct
  misc_feature 1..22: note = Synthetic: E51SaCas9KKH30
  source 1..22: mol_type = other DNA
gagggtgatggtgggtgacctt

SEQ ID NO: 286 - DNA, 22 bp, synthetic construct
  misc_feature 1..22: note = Synthetic: E51SaCas9KKH31
  source 1..22: mol_type = other DNA
tataaaatcacagagggtgatg

SEQ ID NO: 287 - DNA, 22 bp, synthetic construct
  misc_feature 1..22: note = Synthetic: E51SaCas9KKH32
  source 1..22: mol_type = other DNA
aagttataaaatcacagagggt

SEQ ID NO: 288 - DNA, 22 bp, synthetic construct
  misc_feature 1..22: note = Synthetic: E51SaCas9KKH33
  source 1..22: mol_type = other DNA
atcaagttataaaatcacagag

SEQ ID NO: 289 - DNA, 22 bp, synthetic construct
  misc_feature 1..22: note = Synthetic: E51SaCas9KKH34
  source 1..22: mol_type = other DNA
ttgatcaagttataaaatcaca

SEQ ID NO: 290 - DNA, 22 bp, synthetic construct
  misc_feature 1..22: note = Synthetic: E51SaCas9KKH35
  source 1..22: mol_type = other DNA
ctttctctgcttgatcaagtta

SEQ ID NO: 291 - DNA, 22 bp, synthetic construct
  misc_feature 1..22: note = Synthetic: E51SaCas9KKH36
  source 1..22: mol_type = other DNA
ccgactggctttctctgcttga

SEQ ID NO: 292 - DNA, 22 bp, synthetic construct
  misc_feature 1..22: note = Synthetic: E51SaCas9KKH37
  source 1..22: mol_type = other DNA
acttaccgactggctttctctg

SEQ ID NO: 293 - DNA, 22 bp, synthetic construct
  misc_feature 1..22: note = Synthetic: E51SaCas9KKH38
  source 1..22: mol_type = other DNA
gatgttggaggtacctgctctg

SEQ ID NO: 294 - DNA, 22 bp, synthetic construct
  misc_feature 1..22: note = Synthetic: E51SaCas9KKH39
  source 1..22: mol_type = other DNA
aaatgccatcttccttgatgtt

SEQ ID NO: 295 - DNA, 22 bp, synthetic construct
  misc_feature 1..22: note = Synthetic: E51SaCas9KKH40
  source 1..22: mol_type = other DNA
ccaaactagaaatgccatcttc

SEQ ID NO: 296 - DNA, 22 bp, synthetic construct
  misc_feature 1..22: note = Synthetic: E51SaCas9KKH41
  source 1..22: mol_type = other DNA
aggaaactgccatctccaaact

SEQ ID NO: 297 - DNA, 22 bp, synthetic construct
  misc_feature 1..22: note = Synthetic: E51SaCas9KKH42
  source 1..22: mol_type = other DNA
ctgttactctggtgacacaacc

SEQ ID NO: 298 - DNA, 22 bp, synthetic construct
  misc_feature 1..22: note = Synthetic: E51SaCas9KKH43
  source 1..22: mol_type = other DNA
tagctcctactcagactgttac

SEQ ID NO: 299 - DNA, 22 bp, synthetic construct
  misc_feature 1..22: note = Synthetic: E51Slu1
  source 1..22: mol_type = other DNA
tgatcatctcgttgatatcctc

SEQ ID NO: 300 - DNA, 22 bp, synthetic construct
  misc_feature 1..22: note = Synthetic: E51Slu2
  source 1..22: mol_type = other DNA
ttgatcaagcagagaaagccag

SEQ ID NO: 301 - DNA, 22 bp, synthetic construct
  misc_feature 1..22: note = Synthetic: E51Slu3
  source 1..22: mol_type = other DNA
agtcggtaagttctgtccaagc

SEQ ID NO: 302 - DNA, 22 bp, synthetic construct
  misc_feature 1..22: note = Synthetic: E51Slu4
  source 1..22: mol_type = other DNA
gcccggttgaaatctgccagag

SEQ ID NO: 303 - DNA, 22 bp, synthetic construct
  misc_feature 1..22: note = Synthetic: E51Slu5
  source 1..22: mol_type = other DNA
cagagcaggtacctccaacatc

SEQ ID NO: 304 - DNA, 22 bp, synthetic construct
  misc_feature 1..22: note = Synthetic: E51Slu6
  source 1..22: mol_type = other DNA
ggtacctccaacatcaaggaag

SEQ ID NO: 305 - DNA, 22 bp, synthetic construct
  misc_feature 1..22: note = Synthetic: E51Slu7
  source 1..22: mol_type = other DNA
caaggaagatggcatttctagt

SEQ ID NO: 306 - DNA, 22 bp, synthetic construct
  misc_feature 1..22: note = Synthetic: E51Slu8
  source 1..22: mol_type = other DNA
agatggcatttctagtttggag

SEQ ID NO: 307 - DNA, 22 bp, synthetic construct
  misc_feature 1..22: note = Synthetic: E51Slu9
  source 1..22: mol_type = other DNA
atggcagtttccttagtaacca

SEQ ID NO: 308 - DNA, 22 bp, synthetic construct
  misc_feature 1..22: note = Synthetic: E51Slu10
  source 1..22: mol_type = other DNA
gtcaccagagtaacagtctgag

SEQ ID NO: 309 - DNA, 22 bp, synthetic construct
  misc_feature 1..22: note = Synthetic: E51Slu15
  source 1..22: mol_type = other DNA
caacgagatgatcatcaagcag

SEQ ID NO: 310 - DNA, 22 bp, synthetic construct
  misc_feature 1..22: note = Synthetic: E51Slu16
  source 1..22: mol_type = other DNA
gagggtgatggtgggtgacctt

SEQ ID NO: 311 - DNA, 22 bp, synthetic construct
  misc_feature 1..22: note = Synthetic: E51Slu17
  source 1..22: mol_type = other DNA
ataaaatcacagagggtgatgg

SEQ ID NO: 312 - DNA, 22 bp, synthetic construct
  misc_feature 1..22: note = Synthetic: E51Slu18
  source 1..22: mol_type = other DNA
tataaaatcacagagggtgatg

SEQ ID NO: 313 - DNA, 22 bp, synthetic construct
  misc_feature 1..22: note = Synthetic: E51Slu19
  source 1..22: mol_type = other DNA
agttataaaatcacagagggtg

SEQ ID NO: 314 - DNA, 22 bp, synthetic construct
  misc_feature 1..22: note = Synthetic: E51Slu20
  source 1..22: mol_type = other DNA
tgatcaagttataaaatcacag

SEQ ID NO: 315 - DNA, 22 bp, synthetic construct
  misc_feature 1..22: note = Synthetic: E51Slu21
  source 1..22: mol_type = other DNA
ttgatcaagttataaaatcaca

SEQ ID NO: 316 - DNA, 22 bp, synthetic construct
  misc_feature 1..22: note = Synthetic: E51Slu22
  source 1..22: mol_type = other DNA
gggcttggacagaacttaccga

SEQ ID NO: 317 - DNA, 22 bp, synthetic construct
  misc_feature 1..22: note = Synthetic: E51Slu23
  source 1..22: mol_type = other DNA
ctctggcagatttcaaccgggc

SEQ ID NO: 318 - DNA, 22 bp, synthetic construct
  misc_feature 1..22: note = Synthetic: E51Slu24
  source 1..22: mol_type = other DNA
acctgctctggcagatttcaac

SEQ ID NO: 319 - DNA, 22 bp, synthetic construct
  misc_feature 1..22: note = Synthetic: E51Slu25
  source 1..22: mol_type = other DNA
tacctgctctggcagatttcaa

SEQ ID NO: 320 - DNA, 22 bp, synthetic construct
  misc_feature 1..22: note = Synthetic: E51Slu26
  source 1..22: mol_type = other DNA
cttgatgttggaggtacctgct

SEQ ID NO: 321 - DNA, 22 bp, synthetic construct
  misc_feature 1..22: note = Synthetic: E51Slu27
  source 1..22: mol_type = other DNA
aatgccatcttccttgatgttg

SEQ ID NO: 322 - DNA, 22 bp, synthetic construct
  misc_feature 1..22: note = Synthetic: E51Slu28
  source 1..22: mol_type = other DNA
agaaatgccatcttccttgatg

SEQ ID NO: 323 - DNA, 22 bp, synthetic construct
  misc_feature 1..22: note = Synthetic: E51Slu29
  source 1..22: mol_type = other DNA
ggtgacacaacctgtggttact

SEQ ID NO: 324 - DNA, 22 bp, synthetic construct
  misc_feature 1..22: note = Synthetic: E51Slu30
  source 1..22: mol_type = other DNA
tgttactctggtgacacaacct

SEQ ID NO: 325 - DNA, 22 bp, synthetic construct
  misc_feature 1..22: note = Synthetic: E51Slu31
  source 1..22: mol_type = other DNA
agctcctactcagactgttact

SEQ ID NO: 326 - DNA, 22 bp, synthetic construct
  misc_feature 1..22: note = Synthetic: E53Sa1
  source 1..22: mol_type = other DNA
ccttggtttctgtgattttctt

SEQ ID NO: 327 - DNA, 22 bp, synthetic construct
  misc_feature 1..22: note = Synthetic: E53Sa2
  source 1..22: mol_type = other DNA
tccttagcttccagccattgtg

SEQ ID NO: 328 - DNA, 22 bp, synthetic construct
  misc_feature 1..22: note = Synthetic: E53Sa3
  source 1..22: mol_type = other DNA
cttgtacttcatcccactgatt

SEQ ID NO: 329 - DNA, 22 bp, synthetic construct
  misc_feature 1..22: note = Synthetic: E53Sa4
  source 1..22: mol_type = other DNA
actgattctgaattctttcaac

SEQ ID NO: 330 - DNA, 22 bp, synthetic construct
  misc_feature 1..22: note = Synthetic: E53Sa5
  source 1..22: mol_type = other DNA
agccaagcttgagtcatggaag

SEQ ID NO: 331 - DNA, 22 bp, synthetic construct
  misc_feature 1..22: note = Synthetic: E53Sa6
  source 1..22: mol_type = other DNA
ttaggacaggccagagccaagc

SEQ ID NO: 332 - DNA, 22 bp, synthetic construct
  misc_feature 1..22: note = Synthetic: E53Sa7
  source 1..22: mol_type = other DNA
gcaacagttgaatgaaatgtta

SEQ ID NO: 333 - DNA, 22 bp, synthetic construct
  misc_feature 1..22: note = Synthetic: E53Sa8
  source 1..22: mol_type = other DNA
ccttcagaaccggaggcaacag

SEQ ID NO: 334 - DNA, 22 bp, synthetic construct
  misc_feature 1..22: note = Synthetic: E53Sa9
  source 1..22: mol_type = other DNA
agttgaaagaattcagaatcag

SEQ ID NO: 335 - DNA, 22 bp, synthetic construct
  misc_feature 1..22: note = Synthetic: E53Sa10
  source 1..22: mol_type = other DNA
ttttattctagttgaaagaatt

SEQ ID NO: 336 - DNA, 22 bp, synthetic construct
  misc_feature 1..22: note = Synthetic: E53Sa11
  source 1..22: mol_type = other DNA
tttttccttttattctagttga

SEQ ID NO: 337 - DNA, 22 bp, synthetic construct
  misc_feature 1..22: note = Synthetic: E53SaCas9KKH1
  source 1..22: mol_type = other DNA
aaaaggtatctttgatactaac

SEQ ID NO: 338 - DNA, 22 bp, synthetic construct
  misc_feature 1..22: note = Synthetic: E53SaCas9KKH2
  source 1..22: mol_type = other DNA
ctttgatactaaccttggtttc

SEQ ID NO: 339 - DNA, 22 bp, synthetic construct
  misc_feature 1..22: note = Synthetic: E53SaCas9KKH3
  source 1..22: mol_type = other DNA
ccttggtttctgtgattttctt

SEQ ID NO: 340 - DNA, 22 bp, synthetic construct
  misc_feature 1..22: note = Synthetic: E53SaCas9KKH4
  source 1..22: mol_type = other DNA
tccttagcttccagccattgtg

SEQ ID NO: 341 - DNA, 22 bp, synthetic construct
  misc_feature 1..22: note = Synthetic: E53SaCas9KKH5
  source 1..22: mol_type = other DNA
aacatttcattcaactgttgcc

SEQ ID NO: 342 - DNA, 22 bp, synthetic construct
  misc_feature 1..22: note = Synthetic: E53SaCas9KKH6
  source 1..22: mol_type = other DNA
ttcaactgttgcctccggttct

SEQ ID NO: 343 - DNA, 22 bp, synthetic construct
  misc_feature 1..22: note = Synthetic: E53SaCas9KKH7
  source 1..22: mol_type = other DNA
aggtgttcttgtacttcatccc

SEQ ID NO: 344 - DNA, 22 bp, synthetic construct
  misc_feature 1..22: note = Synthetic: E53SaCas9KKH8
  source 1..22: mol_type = other DNA
cttgtacttcatcccactgatt

SEQ ID NO: 345 - DNA, 22 bp, synthetic construct
  misc_feature 1..22: note = Synthetic: E53SaCas9KKH9
  source 1..22: mol_type = other DNA
actgattctgaattctttcaac

SEQ ID NO: 346 - DNA, 22 bp, synthetic construct
  misc_feature 1..22: note = Synthetic: E53SaCas9KKH10
  source 1..22: mol_type = other DNA
ttctttcaactagaataaaagg

SEQ ID NO: 347 - DNA, 22 bp, synthetic construct
  misc_feature 1..22: note = Synthetic: E53SaCas9KKH11
  source 1..22: mol_type = other DNA
ttcaactagaataaaaggaaaa

SEQ ID NO: 348 - DNA, 22 bp, synthetic construct
  misc_feature 1..22: note = Synthetic: E53SaCas9KKH12
  source 1..22: mol_type = other DNA
agaataaaaggaaaaataaata

SEQ ID NO: 349 - DNA, 22 bp, synthetic construct
  misc_feature 1..22: note = Synthetic: E53SaCas9KKH13
  source 1..22: mol_type = other DNA
gttagtatcaaagatacctttt

SEQ ID NO: 350 - DNA, 22 bp, synthetic construct
  misc_feature 1..22: note = Synthetic: E53SaCas9KKH14
  source 1..22: mol_type = other DNA
cacagaaaccaaggttagtatc

SEQ ID NO: 351 - DNA, 22 bp, synthetic construct
  misc_feature 1..22: note = Synthetic: E53SaCas9KKH15
  source 1..22: mol_type = other DNA
aaagaaaatcacagaaaccaag

SEQ ID NO: 352 - DNA, 22 bp, synthetic construct
  misc_feature 1..22: note = Synthetic: E53SaCas9KKH16
  source 1..22: mol_type = other DNA
tccaaaagaaaatcacagaaac

SEQ ID NO: 353 - DNA, 22 bp, synthetic construct
  misc_feature 1..22: note = Synthetic: E53SaCas9KKH17
  source 1..22: mol_type = other DNA
atacagtagatgcaatccaaaa

SEQ ID NO: 354 - DNA, 22 bp, synthetic construct
  misc_feature 1..22: note = Synthetic: E53SaCas9KKH18
  source 1..22: mol_type = other DNA
aggagggtccctatacagtaga

SEQ ID NO: 355 - DNA, 22 bp, synthetic construct
  misc_feature 1..22: note = Synthetic: E53SaCas9KKH19
  source 1..22: mol_type = other DNA
atggaaggagggtccctataca

SEQ ID NO: 356 - DNA, 22 bp, synthetic construct
  misc_feature 1..22: note = Synthetic: E53SaCas9KKH20
  source 1..22: mol_type = other DNA
agtcatggaaggagggtcccta

SEQ ID NO: 357 - DNA, 22 bp, synthetic construct
  misc_feature 1..22: note = Synthetic: E53SaCas9KKH21
  source 1..22: mol_type = other DNA
agccaagcttgagtcatggaag

SEQ ID NO: 358 - DNA, 22 bp, synthetic construct
  misc_feature 1..22: note = Synthetic: E53SaCas9KKH22
  source 1..22: mol_type = other DNA
ttaggacaggccagagccaagc

SEQ ID NO: 359 - DNA, 22 bp, synthetic construct
  misc_feature 1..22: note = Synthetic: E53SaCas9KKH23
  source 1..22: mol_type = other DNA
tggaagctaaggaagaagctga

SEQ ID NO: 360 - DNA, 22 bp, synthetic construct
  misc_feature 1..22: note = Synthetic: E53SaCas9KKH24
  source 1..22: mol_type = other DNA
aatgaaatgttaaaggattcaa

SEQ ID NO: 361 - DNA, 22 bp, synthetic construct
  misc_feature 1..22: note = Synthetic: E53SaCas9KKH25
  source 1..22: mol_type = other DNA
gcaacagttgaatgaaatgtta

SEQ ID NO: 362 - DNA, 22 bp, synthetic construct
  misc_feature 1..22: note = Synthetic: E53SaCas9KKH26
  source 1..22: mol_type = other DNA
agaaccggaggcaacagttgaa

SEQ ID NO: 363 - DNA, 22 bp, synthetic construct
  misc_feature 1..22: note = Synthetic: E53SaCas9KKH27
  source 1..22: mol_type = other DNA
ccttcagaaccggaggcaacag

SEQ ID NO: 364 - DNA, 22 bp, synthetic construct
  misc_feature 1..22: note = Synthetic: E53SaCas9KKH28
  source 1..22: mol_type = other DNA
gaacaccttcagaaccggaggc

SEQ ID NO: 365 - DNA, 22 bp, synthetic construct
  misc_feature 1..22: note = Synthetic: E53SaCas9KKH29
  source 1..22: mol_type = other DNA
aaagaattcagaatcagtggga

SEQ ID NO: 366 - DNA, 22 bp, synthetic construct
  misc_feature 1..22: note = Synthetic: E53SaCas9KKH30
  source 1..22: mol_type = other DNA
agttgaaagaattcagaatcag

SEQ ID NO: 367 - DNA, 22 bp, synthetic construct
  misc_feature 1..22: note = Synthetic: E53SaCas9KKH31
  source 1..22: mol_type = other DNA
attctagttgaaagaattcaga

SEQ ID NO: 368 - DNA, 22 bp, synthetic construct
  misc_feature 1..22: note = Synthetic: E53SaCas9KKH32
  source 1..22: mol_type = other DNA
ttttattctagttgaaagaatt

SEQ ID NO: 369 - DNA, 22 bp, synthetic construct
  misc_feature 1..22: note = Synthetic: E53SaCas9KKH33
  source 1..22: mol_type = other DNA
tttttccttttattctagttga

SEQ ID NO: 370 - DNA, 22 bp, synthetic construct
  misc_feature 1..22: note = Synthetic: E53SaCas9KKH34
  source 1..22: mol_type = other DNA
atatatttatttttccttttat

SEQ ID NO: 371 - DNA, 22 bp, synthetic construct
  misc_feature 1..22: note = Synthetic: E53Slu2
  source 1..22: mol_type = other DNA
ccttggtttctgtgattttctt

SEQ ID NO: 372 - DNA, 22 bp, synthetic construct
  misc_feature 1..22: note = Synthetic: E53Slu3
  source 1..22: mol_type = other DNA
cttttggattgcatctactgta

SEQ ID NO: 373 - DNA, 22 bp, synthetic construct
  misc_feature 1..22: note = Synthetic: E53Slu4
  source 1..22: mol_type = other DNA
ttttggattgcatctactgtat

SEQ ID NO: 374 - DNA, 22 bp, synthetic construct
  misc_feature 1..22: note = Synthetic: E53Slu5
  source 1..22: mol_type = other DNA
accctccttccatgactcaagc

SEQ ID NO: 375 - DNA, 22 bp, synthetic construct
  misc_feature 1..22: note = Synthetic: E53Slu6
  source 1..22: mol_type = other DNA
cttccatgactcaagcttggct

SEQ ID NO: 376 - DNA, 22 bp, synthetic construct
  misc_feature 1..22: note = Synthetic: E53Slu7
  source 1..22: mol_type = other DNA
acatttcattcaactgttgcct

SEQ ID NO: 377 - DNA, 22 bp, synthetic construct
  misc_feature 1..22: note = Synthetic: E53Slu8
  source 1..22: mol_type = other DNA
tcaactgttgcctccggttctg

SEQ ID NO: 378 - DNA, 22 bp, synthetic construct
  misc_feature 1..22: note = Synthetic: E53Slu10
  source 1..22: mol_type = other DNA
ccaaaagaaaatcacagaaacc

SEQ ID NO: 379 - DNA, 22 bp, synthetic construct
  misc_feature 1..22: note = Synthetic: E53Slu11
  source 1..22: mol_type = other DNA
gccaagcttgagtcatggaagg

SEQ ID NO: 380 - DNA, 22 bp, synthetic construct
  misc_feature 1..22: note = Synthetic: E53Slu12
  source 1..22: mol_type = other DNA
agccaagcttgagtcatggaag

SEQ ID NO: 381 - DNA, 22 bp, synthetic construct
  misc_feature 1..22: note = Synthetic: E53Slu13
  source 1..22: mol_type = other DNA
cagagccaagcttgagtcatgg

SEQ ID NO: 382 - DNA, 22 bp, synthetic construct
  misc_feature 1..22: note = Synthetic: E53Slu14
  source 1..22: mol_type = other DNA
aggccagagccaagcttgagtc

SEQ ID NO: 383 - DNA, 22 bp, synthetic construct
  misc_feature 1..22: note = Synthetic: E53Slu15
  source 1..22: mol_type = other DNA
agaagctgagcaggtcttagga

SEQ ID NO: 384 - DNA, 22 bp, synthetic construct
  misc_feature 1..22: note = Synthetic: E53Slu16
  source 1..22: mol_type = other DNA
aaggaagaagctgagcaggtct

SEQ ID NO: 385 - DNA, 22 bp, synthetic construct
  misc_feature 1..22: note = Synthetic: E53Slu17
  source 1..22: mol_type = other DNA
ggaagctaaggaagaagctgag

SEQ ID NO: 386 - DNA, 22 bp, synthetic construct
  misc_feature 1..22: note = Synthetic: E53Slu18
  source 1..22: mol_type = other DNA
ttcaacacaatggctggaagct

SEQ ID NO: 387 - DNA, 22 bp, synthetic construct
  misc_feature 1..22: note = Synthetic: E53Slu19
  source 1..22: mol_type = other DNA
gttaaaggattcaacacaatgg

SEQ ID NO: 388 - DNA, 22 bp, synthetic construct
  misc_feature 1..22: note = Synthetic: E53Slu20
  source 1..22: mol_type = other DNA
aaatgttaaaggattcaacaca

SEQ ID NO: 389 - DNA, 22 bp, synthetic construct
  misc_feature 1..22: note = Synthetic: E53Slu21
  source 1..22: mol_type = other DNA
gcaacagttgaatgaaatgtta

SEQ ID NO: 390 - DNA, 22 bp, synthetic construct
  misc_feature 1..22: note = Synthetic: E53Slu22
  source 1..22: mol_type = other DNA
tacaagaacaccttcagaaccg

SEQ ID NO: 391 - DNA, 22 bp, synthetic construct
  misc_feature 1..22: note = Synthetic: E53Slu23
  source 1..22: mol_type = other DNA
aagtacaagaacaccttcagaa

SEQ ID NO: 392 - DNA, 22 bp, synthetic construct
  misc_feature 1..22: note = Synthetic: E53Slu24
  source 1..22: mol_type = other DNA
agttgaaagaattcagaatcag

SEQ ID NO: 393 - DNA, 22 bp, synthetic construct
  misc_feature 1..22: note = Synthetic: E53Slu25
  source 1..22: mol_type = other DNA
tagttgaaagaattcagaatca

SEQ ID NO: 394-499 - skipped (106 entries)

SEQ ID NO: 500 - DNA, 86 bp, synthetic construct
  misc_feature 1..86: note = Synthetic: An exemplary scaffold sequence suitable for use with SaCas9 to follow the guide sequence at its 3 end
  source 1..86: mol_type = other DNA
gtttaagtactctgtgctggaaacagcacagaatctacttaaacaaggcaaaatgccgtgtttatctcgtcaacttgttggcgaga

SEQ ID NO: 501 - DNA, 77 bp, synthetic construct
  misc_feature 1..77: note = Synthetic: SaScaffoldV1
  source 1..77: mol_type = other DNA
gttttagtactctggaaacagaatctactaaaacaaggcaaaatgccgtgtttatctcgtcaacttgttggcgagat

SEQ ID NO: 502 - DNA, 87 bp, synthetic construct
  misc_feature 1..87: note = Synthetic: SaScaffoldV2
  source 1..87: mol_type = other DNA
gtttaagtactctgtgctggaaacagcacagaatctacttaaacaaggcaaaatgccgtgtttatctcgtcaacttgttggcgagat

SEQ ID NO: 503 - DNA, 77 bp, synthetic construct
  misc_feature 1..77: note = Synthetic: SaScaffoldV3
  source 1..77: mol_type = other DNA
gtttaagtactctggaaacagaatctacttaaacaaggcaaaatgccgtgtttatctcgtcaacttgttggcgagat

SEQ ID NO: 504 - DNA, 77 bp, synthetic construct
  misc_feature 1..77: note = Synthetic: SaScaffoldV5
  source 1..77: mol_type = other DNA
gtttcagtactctggaaacagaatctactgaaacaaggcaaaatgccgtgtttatctcgtcaacttgttggcgagat

SEQ ID NO: 505-549 - skipped (45 entries)

SEQ ID NO: 550 - protein, 4 aa, synthetic construct
  REGION 1..4: note = Synthetic: linker
GSVD

SEQ ID NO: 551 - protein, 4 aa, synthetic construct
  REGION 1..4: note = Synthetic: linker
GSGS

SEQ ID NO: 552-599 - skipped (48 entries)

SEQ ID NO: 600 - DNA, 76 bp, synthetic construct
  source 1..76: mol_type = other DNA
gttttagtactctggaaacagaatctactgaaacaagacaatatgtcgtgtttatcccatcaatttattggtggga

SEQ ID NO: 601 - DNA, 86 bp, synthetic construct
  misc_feature 1..86: note = Synthetic: Slu-VCGT-4.5
  source 1..86: mol_type = other DNA
gtttaagtactctgtgctggaaacagcacagaatctactgaaacaagacaatatgtcgtgtttatcccatcaatttattggtggga

SEQ ID NO: 602-699 - skipped (98 entries)

SEQ ID NO: 700 - DNA, 450 bp, synthetic construct
  misc_feature 1..450: note = Synthetic: CK8 promoter
  source 1..450: mol_type = other DNA
ctagactagcatgctgcccatgtaaggaggcaaggcctggggacacccgagatgcctggttataattaacccagacatgtggctgcccccccccccccaacacctgctgcctctaaaaataaccctgcatgccatgttcccggcgaagggccagctgtcccccgccagctagactcagcacttagtttaggaaccagtgagcaagtcagcccttggggcagcccatacaaggccatggggctgggcaagctgcacgcctgggtccggggtgggcacggtgcccgggcaacgagctgaaagctcatctgctctcaggggcccctccctggggacagcccctcctggctagtcacaccctgtaggctcctctatataacccaggggcacaggggctgccctcattctaccaccacctccacagcacagacagacactcaggagccagccagc

SEQ ID NO: 701 - DNA, 436 bp, synthetic construct
  misc_feature 1..436: note = Synthetic: CK8e promoter
  source 1..436: mol_type = other DNA
tgcccatgtaaggaggcaaggcctggggacacccgagatgcctggttataattaacccagacatgtggctgcccccccccccccaacacctgctgcctctaaaaataaccctgcatgccatgttcccggcgaagggccagctgtcccccgccagctagactcagcacttagtttaggaaccagtgagcaagtcagcccttggggcagcccatacaaggccatggggctgggcaagctgcacgcctgggtccggggtgggcacggtgcccgggcaacgagctgaaagctcatctgctctcaggggcccctccctggggacagcccctcctggctagtcacaccctgtaggctcctctatataacccaggggcacaggggctgccctcattctaccaccacctccacagcacagacagacactcaggagccagccagc

SEQ ID NO: 702 - DNA, 472 bp, synthetic construct
  misc_feature 1..472: note = Synthetic: U6 promoter
  source 1..472: mol_type = other DNA
cgagtccaacacccgtgggaatcccatgggcaccatggcccctcgctccaaaaatgctttcgcgtcgcgcagacactgctcggtagtttcggggatcagcgtttgagtaagagcccgcgtctgaaccctccgcgccgccccggccccagtggaaagacgcgcaggcaaaacgcaccacgtgacggagcgtgaccgcgcgccgagcgcgcgccaaggtcgggcaggaagagggcctatttcccatgattccttcatatttgcatatacgatacaaggctgttagagagataattagaattaatttgactgtaaacacaaagatattagtacaaaatacgtgacgtagaaagtaataatttcttgggtagtttgcagttttaaaattatgttttaaaatggactatcatatgcttaccgtaacttgaaagtatttcgatttcttggctttatatatcttgtggaaaggacgaaa

SEQ ID NO: 703 - DNA, 108 bp, synthetic construct
  misc_feature 1..108: note = Synthetic: H1 promoter
  source 1..108: mol_type = other DNA
gctcggcgcgcccatatttgcatgtcgctatgtgttctgggaaatcaccataaacgtgaaatgtctttggatttgggaatcttataagttctgtatgagaccacggta

SEQ ID NO: 704 - DNA, 251 bp, synthetic construct
  misc_feature 1..251: note = Synthetic: 7SK promoter
  source 1..251: mol_type = other DNA
tgacggcgcgccctgcagtatttagcatgccccacccatctgcaaggcattctggatagtgtcaaaacagccggaaatcaagtccgtttatctcaaactttagcattttgggaataaatgatatttgctatgctggttaaattagattttagttaaatttcctgctgaagctctagtacgataagtaacttgacctaagtgtaaagttgagatttccttcaggtttatatagcttgtgcgccgcctgggta

SEQ ID NO: 705 - DNA, 249 bp, synthetic construct
  misc_feature 1..249: note = Synthetic: U6 promoter
  source 1..249: mol_type = other DNA
gagggcctatttcccatgattccttcatatttgcatatacgatacaaggctgttagagagataattggaattaatttgactgtaaacacaaagatattagtacaaaatacgtgacgtagaaagtaataatttcttgggtagtttgcagttttaaaattatgttttaaaatggactatcatatgcttaccgtaacttgaaagtatttcgatttcttggctttatatatcttgtggaaaggacgaaacacc

SEQ ID NO: 706 - DNA, 243 bp, synthetic construct
  misc_feature 1..243: note = Synthetic: 7SK2 promoter
  source 1..243: mol_type = other DNA
ctgcagtatttagcatgccccacccatctgcaaggcattctggatagtgtcaaaacagccggaaatcaagtccgtttatctcaaactttagcattttgggaataaatgatatttgctatgctggttaaattagattttagttaaatttcctgctgaagctctagtacgataagcaacttgacctaagtgtaaagttgagacttccttcaggtttatatagcttgtgcgccgcttgggtacctc

SEQ ID NO: 707 - DNA, 100 bp, synthetic construct
  misc_feature 1..100: note = Synthetic: H1m or mH1 promoter
  source 1..100: mol_type = other DNA
aatatttgcatgtcgctatgtgttctgggaaatcaccataaacgtgaaatgtctttggatttgggaatcttataagttctgtatgagaccactctttccc

SEQ ID NO: 708 - DNA, 100 bp, synthetic construct
  misc_feature 1..100: note = Synthetic: M11 promoter
  source 1..100: mol_type = other DNA
atatttagcatgtcgctatgtgttctgggaaacttgacctaagtgtaaagttgagatttccttcaggtttatatagttctgtatgagaccactctttccc

SEQ ID NO: 709 - DNA, 143 bp, synthetic construct
  misc_feature 1..143: note = Synthetic: 5  ITR
  source 1..143: mol_type = other DNA
ggccactccctctctgcgcgctcgctcgctcactgaggccgggcgaccaaaggtcgcccgacgcccgggctttgcccgggcggcctcagtgagcgagcgagcgcgcagagagggagtggccaactccatcactaggggttcct

SEQ ID NO: 710 - DNA, 137 bp, synthetic construct
  misc_feature 1..137: note = Synthetic: 3 ITR
  source 1..137: mol_type = other DNA
aggaacccctagtgatggagttggccactccctctctgcgcgctcgctcgctcactgaggccgggcgaccaaaggtcgcccgacgcccgggctttgcccgggcggcctcagtgagcgagcgagcgcgcagagaggga

SEQ ID NO: 711 - protein, 1052 aa, Staphylococcus aureus
  REGION 1..1052: note = misc_feature - SaCas9
KRNYILGLDIGITSVGYGIIDYETRDVIDAGVRLFKEANVENNEGRRSKRGARRLKRRRRHRIQRVKKLLFDYNLLTDHSELSGINPYEARVKGLSQKLSEEEFSAALLHLAKRRGVHNVNEVEEDTGNELSTKEQISRNSKALEEKYVAELQLERLKKDGEVRGSINRFKTSDYVKEAKQLLKVQKAYHQLDQSFIDTYIDLLETRRTYYEGPGEGSPFGWKDIKEWYEMLMGHCTYFPEELRSVKYAYNADLYNALNDLNNLVITRDENEKLEYYEKFQIIENVFKQKKKPTLKQIAKEILVNEEDIKGYRVTSTGKPEFTNLKVYHDIKDITARKEIIENAELLDQIAKILTIYQSSEDIQEELTNLNSELTQEEIEQISNLKGYTGTHNLSLKAINLILDELWHTNDNQIAIFNRLKLVPKKVDLSQQKEIPTTLVDDFILSPVVKRSFIQSIKVINAIIKKYGLPNDIIIELAREKNSKDAQKMINEMQKRNRQTNERIEEIIRTTGKENAKYLIEKIKLHDMQEGKCLYSLEAIPLEDLLNNPFNYEVDHIIPRSVSFDNSFNNKVLVKQEENSKKGNRTPFQYLSSSDSKISYETFKKHILNLAKGKGRISKTKKEYLLEERDINRFSVQKDFINRNLVDTRYATRGLMNLLRSYFRVNNLDVKVKSINGGFTSFLRRKWKFKKERNKGYKHHAEDALIIANADFIFKEWKKLDKAKKVMENQMFEEKQAESMPEIETEQEYKEIFITPHQIKHIKDFKDYKYSHRVDKKPNRELINDTLYSTRKDDKGNTLIVNNLNGLYDKDNDKLKKLINKSPEKLLMYHHDPQTYQKLKLIMEQYGDEKNPLYKYYEETGNYLTKYSKKDNGPVIKKIKYYGNKLNAHLDITDDYPNSRNKVVKLSLKPYRFDVYLDNGVYKFVTVKNLDVIKKENYYEVNSKCYEEAKKLKKISNQAEFIASFYNNDLIKINGELYRVIGVNNDLLNRIEVNMIDITYREYLENMNDKRPPRIIKTIASKTQSIKKYSTDILGNLYEVKSKKHPQIIKKG

SEQ ID NO: 712 - protein, 1053 aa, Staphylococcus lugdunensis
  REGION 1..1053: note = misc_feature - SluCas9
NQKFILGLDIGITSVGYGLIDYETKNIIDAGVRLFPEANVENNEGRRSKRGSRRLKRRRIHRLERVKKLLEDYNLLDQSQIPQSTNPYAIRVKGLSEALSKDELVIALLHIAKRRGIHKIDVIDSNDDVGNELSTKEQLNKNSKLLKDKFVCQIQLERMNEGQVRGEKNRFKTADIIKEIIQLLNVQKNFHQLDENFINKYIELVEMRREYFEGPGKGSPYGWEGDPKAWYETLMGHCTYFPDELRSVKYAYSADLFNALNDLNNLVIQRDGLSKLEYHEKYHIIENVFKQKKKPTLKQIANEINVNPEDIKGYRITKSGKPQFTEFKLYHDLKSVLFDQSILENEDVLDQIAEILTIYQDKDSIKSKLTELDILLNEEDKENIAQLTGYTGTHRLSLKCIRLVLEEQWYSSRNQMEIFTHLNIKPKKINLTAANKIPKAMIDEFILSPVVKRTFGQAINLINKIIEKYGVPEDIIIELARENNSKDKQKFINEMQKKNENTRKRINEIIGKYGNQNAKRLVEKIRLHDEQEGKCLYSLESIPLEDLLNNPNHYEVDHIIPRSVSFDNSYHNKVLVKQSENSKKSNLTPYQYFNSGKSKLSYNQFKQHILNLSKSQDRISKKKKEYLLEERDINKFEVQKEFINRNLVDTRYATRELTNYLKAYFSANNMNVKVKTINGSFTDYLRKVWKFKKERNHGYKHHAEDALIIANADFLFKENKKLKAVNSVLEKPEIETKQLDIQVDSEDNYSEMFIIPKQVQDIKDFRNFKYSHRVDKKPNRQLINDTLYSTRKKDNSTYIVQTIKDIYAKDNTTLKKQFDKSPEKFLMYQHDPRTFEKLEVIMKQYANEKNPLAKYHEETGEYLTKYSKKNNGPIVKSLKYIGNKLGSHLDVTHQFKSSTKKLVKLSIKPYRFDVYLTDKGYKFITISYLDVLKKDNYYYIPEQKYDKLKLGKAIDKNAKFIASFYKNDLIKLDGEIYKIIGVNSDTRNMIELDLPDIRYKEYCELNNIKGEPRIKKTIGKKVNSIEKLTTDVLGNVFTNTQYTKPQLLFKRGN

SEQ ID NO: 713 - protein, 7 aa, synthetic construct
  REGION 1..7: note = Synthetic: SV40
PKKKRKV

SEQ ID NO: 714 - protein, 16 aa, synthetic construct
  REGION 1..16: note = Synthetic: nucleoplasmin NLS
KRPAATKKAGQAKKKK

SEQ ID NO: 715 - protein, 1052 aa, synthetic construct
  REGION 1..1052: note = Synthetic: SaCas9-KKH or SACAS9KKH
KRNYILGLDIGITSVGYGIIDYETRDVIDAGVRLFKEANVENNEGRRSKRGARRLKRRRRHRIQRVKKLLFDYNLLTDHSELSGINPYEARVKGLSQKLSEEEFSAALLHLAKRRGVHNVNEVEEDTGNELSTKEQISRNSKALEEKYVAELQLERLKKDGEVRGSINRFKTSDYVKEAKQLLKVQKAYHQLDQSFIDTYIDLLETRRTYYEGPGEGSPFGWKDIKEWYEMLMGHCTYFPEELRSVKYAYNADLYNALNDLNNLVITRDENEKLEYYEKFQIIENVFKQKKKPTLKQIAKEILVNEEDIKGYRVTSTGKPEFTNLKVYHDIKDITARKEIIENAELLDQIAKILTIYQSSEDIQEELTNLNSELTQEEIEQISNLKGYTGTHNLSLKAINLILDELWHTNDNQIAIFNRLKLVPKKVDLSQQKEIPTTLVDDFILSPVVKRSFIQSIKVINAIIKKYGLPNDIIIELAREKNSKDAQKMINEMQKRNRQTNERIEEIIRTTGKENAKYLIEKIKLHDMQEGKCLYSLEAIPLEDLLNNPFNYEVDHIIPRSVSFDNSFNNKVLVKQEENSKKGNRTPFQYLSSSDSKISYETFKKHILNLAKGKGRISKTKKEYLLEERDINRFSVQKDFINRNLVDTRYATRGLMNLLRSYFRVNNLDVKVKSINGGFTSFLRRKWKFKKERNKGYKHHAEDALIIANADFIFKEWKKLDKAKKVMENQMFEEKQAESMPEIETEQEYKEIFITPHQIKHIKDFKDYKYSHRVDKKPNRKLINDTLYSTRKDDKGNTLIVNNLNGLYDKDNDKLKKLINKSPEKLLMYHHDPQTYQKLKLIMEQYGDEKNPLYKYYEETGNYLTKYSKKDNGPVIKKIKYYGNKLNAHLDITDDYPNSRNKVVKLSLKPYRFDVYLDNGVYKFVTVKNLDVIKKENYYEVNSKCYEEAKKLKKISNQAEFIASFYKNDLIKINGELYRVIGVNNDLLNRIEVNMIDITYREYLENMNDKRPPHIIKTIASKTQSIKKYSTDILGNLYEVKSKKHPQIIKKG

SEQ ID NO: 716 - protein, 1052 aa, synthetic construct
  REGION 1..1052: note = Synthetic: SaCas9-HF
KRNYILGLDIGITSVGYGIIDYETRDVIDAGVRLFKEANVENNEGRRSKRGARRLKRRRRHRIQRVKKLLFDYNLLTDHSELSGINPYEARVKGLSQKLSEEEFSAALLHLAKRRGVHNVNEVEEDTGNELSTKEQISRNSKALEEKYVAELQLERLKKDGEVRGSINRFKTSDYVKEAKQLLKVQKAYHQLDQSFIDTYIDLLETRRTYYEGPGEGSPFGWKDIKEWYEMLMGHCTYFPEELASVKYAYNADLYNALNDLNNLVITRDENEKLEYYEKFQIIENVFKQKKKPTLKQIAKEILVNEEDIKGYRVTSTGKPEFTNLKVYHDIKDITARKEIIENAELLDQIAKILTIYQSSEDIQEELTNLNSELTQEEIEQISNLKGYTGTHNLSLKAINLILDELWHTNDAQIAIFARLKLVPKKVDLSQQKEIPTTLVDDFILSPVVKRSFIQSIKVINAIIKKYGLPNDIIIELAREKNSKDAQKMINEMQKRNRQTNERIEEIIRTTGKENAKYLIEKIKLHDMQEGKCLYSLEAIPLEDLLNNPFNYEVDHIIPRSVSFDNSFNNKVLVKQEENSKKGNRTPFQYLSSSDSKISYETFKKHILNLAKGKGRISKTKKEYLLEERDINRFSVQKDFINRNLVDTRYATAGLMNLLRSYFRVNNLDVKVKSINGGFTSFLRRKWKFKKERNKGYKHHAEDALIIANADFIFKEWKKLDKAKKVMENQMFEEKQAESMPEIETEQEYKEIFITPHQIKHIKDFKDYKYSHRVDKKPNRELINDTLYSTRKDDKGNTLIVNNLNGLYDKDNDKLKKLINKSPEKLLMYHHDPQTYQKLKLIMEQYGDEKNPLYKYYEETGNYLTKYSKKDNGPVIKKIKYYGNKLNAHLDITDDYPNSRNKVVKLSLKPYRFDVYLDNGVYKFVTVKNLDVIKKENYYEVNSKCYEEAKKLKKISNQAEFIASFYNNDLIKINGELYRVIGVNNDLLNRIEVNMIDITYREYLENMNDKRPPRIIKTIASKTQSIKKYSTDILGNLYEVKSKKHPQIIKKG

SEQ ID NO: 717 - protein, 1052 aa, synthetic construct
  REGION 1..1052: note = Synthetic: SaCas9-KKH-HF
KRNYILGLDIGITSVGYGIIDYETRDVIDAGVRLFKEANVENNEGRRSKRGARRLKRRRRHRIQRVKKLLFDYNLLTDHSELSGINPYEARVKGLSQKLSEEEFSAALLHLAKRRGVHNVNEVEEDTGNELSTKEQISRNSKALEEKYVAELQLERLKKDGEVRGSINRFKTSDYVKEAKQLLKVQKAYHQLDQSFIDTYIDLLETRRTYYEGPGEGSPFGWKDIKEWYEMLMGHCTYFPEELASVKYAYNADLYNALNDLNNLVITRDENEKLEYYEKFQIIENVFKQKKKPTLKQIAKEILVNEEDIKGYRVTSTGKPEFTNLKVYHDIKDITARKEIIENAELLDQIAKILTIYQSSEDIQEELTNLNSELTQEEIEQISNLKGYTGTHNLSLKAINLILDELWHTNDAQIAIFARLKLVPKKVDLSQQKEIPTTLVDDFILSPVVKRSFIQSIKVINAIIKKYGLPNDIIIELAREKNSKDAQKMINEMQKRNRQTNERIEEIIRTTGKENAKYLIEKIKLHDMQEGKCLYSLEAIPLEDLLNNPFNYEVDHIIPRSVSFDNSFNNKVLVKQEENSKKGNRTPFQYLSSSDSKISYETFKKHILNLAKGKGRISKTKKEYLLEERDINRFSVQKDFINRNLVDTRYATAGLMNLLRSYFRVNNLDVKVKSINGGFTSFLRRKWKFKKERNKGYKHHAEDALIIANADFIFKEWKKLDKAKKVMENQMFEEKQAESMPEIETEQEYKEIFITPHQIKHIKDFKDYKYSHRVDKKPNRKLINDTLYSTRKDDKGNTLIVNNLNGLYDKDNDKLKKLINKSPEKLLMYHHDPQTYQKLKLIMEQYGDEKNPLYKYYEETGNYLTKYSKKDNGPVIKKIKYYGNKLNAHLDITDDYPNSRNKVVKLSLKPYRFDVYLDNGVYKFVTVKNLDVIKKENYYEVNSKCYEEAKKLKKISNQAEFIASFYKNDLIKINGELYRVIGVNNDLLNRIEVNMIDITYREYLENMNDKRPPHIIKTIASKTQSIKKYSTDILGNLYEVKSKKHPQIIKKG

SEQ ID NO: 718 - protein, 1053 aa, synthetic construct
  REGION 1..1053: note = Synthetic: SluCas9-KHorSLUCAS9KH
NQKFILGLDIGITSVGYGLIDYETKNIIDAGVRLFPEANVENNEGRRSKRGSRRLKRRRIHRLERVKKLLEDYNLLDQSQIPQSTNPYAIRVKGLSEALSKDELVIALLHIAKRRGIHKIDVIDSNDDVGNELSTKEQLNKNSKLLKDKFVCQIQLERMNEGQVRGEKNRFKTADIIKEIIQLLNVQKNFHQLDENFINKYIELVEMRREYFEGPGKGSPYGWEGDPKAWYETLMGHCTYFPDELRSVKYAYSADLFNALNDLNNLVIQRDGLSKLEYHEKYHIIENVFKQKKKPTLKQIANEINVNPEDIKGYRITKSGKPQFTEFKLYHDLKSVLFDQSILENEDVLDQIAEILTIYQDKDSIKSKLTELDILLNEEDKENIAQLTGYTGTHRLSLKCIRLVLEEQWYSSRNQMEIFTHLNIKPKKINLTAANKIPKAMIDEFILSPVVKRTFGQAINLINKIIEKYGVPEDIIIELARENNSKDKQKFINEMQKKNENTRKRINEIIGKYGNQNAKRLVEKIRLHDEQEGKCLYSLESIPLEDLLNNPNHYEVDHIIPRSVSFDNSYHNKVLVKQSENSKKSNLTPYQYFNSGKSKLSYNQFKQHILNLSKSQDRISKKKKEYLLEERDINKFEVQKEFINRNLVDTRYATRELTNYLKAYFSANNMNVKVKTINGSFTDYLRKVWKFKKERNHGYKHHAEDALIIANADFLFKENKKLKAVNSVLEKPEIETKQLDIQVDSEDNYSEMFIIPKQVQDIKDFRNFKYSHRVDKKPNRKLINDTLYSTRKKDNSTYIVQTIKDIYAKDNTTLKKQFDKSPEKFLMYQHDPRTFEKLEVIMKQYANEKNPLAKYHEETGEYLTKYSKKNNGPIVKSLKYIGNKLGSHLDVTHQFKSSTKKLVKLSIKPYRFDVYLTDKGYKFITISYLDVLKKDNYYYIPEQKYDKLKLGKAIDKNAKFIASFYKNDLIKLDGEIYKIIGVNSDTRNMIELDLPDIRYKEYCELNNIKGEPHIKKTIGKKVNSIEKLTTDVLGNVFTNTQYTKPQLLFKRGN

SEQ ID NO: 719 - protein, 1053 aa, synthetic construct
  REGION 1..1053: note = Synthetic: SluCas9-HF
NQKFILGLDIGITSVGYGLIDYETKNIIDAGVRLFPEANVENNEGRRSKRGSRRLKRRRIHRLERVKKLLEDYNLLDQSQIPQSTNPYAIRVKGLSEALSKDELVIALLHIAKRRGIHKIDVIDSNDDVGNELSTKEQLNKNSKLLKDKFVCQIQLERMNEGQVRGEKNRFKTADIIKEIIQLLNVQKNFHQLDENFINKYIELVEMRREYFEGPGKGSPYGWEGDPKAWYETLMGHCTYFPDELASVKYAYSADLFNALNDLNNLVIQRDGLSKLEYHEKYHIIENVFKQKKKPTLKQIANEINVNPEDIKGYRITKSGKPQFTEFKLYHDLKSVLFDQSILENEDVLDQIAEILTIYQDKDSIKSKLTELDILLNEEDKENIAQLTGYTGTHRLSLKCIRLVLEEQWYSSRAQMEIFAHLNIKPKKINLTAANKIPKAMIDEFILSPVVKRTFGQAINLINKIIEKYGVPEDIIIELARENNSKDKQKFINEMQKKNENTRKRINEIIGKYGNQNAKRLVEKIRLHDEQEGKCLYSLESIPLEDLLNNPNHYEVDHIIPRSVSFDNSYHNKVLVKQSENSKKSNLTPYQYFNSGKSKLSYNQFKQHILNLSKSQDRISKKKKEYLLEERDINKFEVQKEFINRNLVDTRYATAELTNYLKAYFSANNMNVKVKTINGSFTDYLRKVWKFKKERNHGYKHHAEDALIIANADFLFKENKKLKAVNSVLEKPEIETKQLDIQVDSEDNYSEMFIIPKQVQDIKDFRNFKYSHRVDKKPNRQLINDTLYSTRKKDNSTYIVQTIKDIYAKDNTTLKKQFDKSPEKFLMYQHDPRTFEKLEVIMKQYANEKNPLAKYHEETGEYLTKYSKKNNGPIVKSLKYIGNKLGSHLDVTHQFKSSTKKLVKLSIKPYRFDVYLTDKGYKFITISYLDVLKKDNYYYIPEQKYDKLKLGKAIDKNAKFIASFYKNDLIKLDGEIYKIIGVNSDTRNMIELDLPDIRYKEYCELNNIKGEPRIKKTIGKKVNSIEKLTTDVLGNVFTNTQYTKPQLLFKRGN

SEQ ID NO: 720 - protein, 1053 aa, synthetic construct
  REGION 1..1053: note = Synthetic: SluCas9-HF-KH
NQKFILGLDIGITSVGYGLIDYETKNIIDAGVRLFPEANVENNEGRRSKRGSRRLKRRRIHRLERVKKLLEDYNLLDQSQIPQSTNPYAIRVKGLSEALSKDELVIALLHIAKRRGIHKIDVIDSNDDVGNELSTKEQLNKNSKLLKDKFVCQIQLERMNEGQVRGEKNRFKTADIIKEIIQLLNVQKNFHQLDENFINKYIELVEMRREYFEGPGKGSPYGWEGDPKAWYETLMGHCTYFPDELASVKYAYSADLFNALNDLNNLVIQRDGLSKLEYHEKYHIIENVFKQKKKPTLKQIANEINVNPEDIKGYRITKSGKPQFTEFKLYHDLKSVLFDQSILENEDVLDQIAEILTIYQDKDSIKSKLTELDILLNEEDKENIAQLTGYTGTHRLSLKCIRLVLEEQWYSSRAQMEIFAHLNIKPKKINLTAANKIPKAMIDEFILSPVVKRTFGQAINLINKIIEKYGVPEDIIIELARENNSKDKQKFINEMQKKNENTRKRINEIIGKYGNQNAKRLVEKIRLHDEQEGKCLYSLESIPLEDLLNNPNHYEVDHIIPRSVSFDNSYHNKVLVKQSENSKKSNLTPYQYFNSGKSKLSYNQFKQHILNLSKSQDRISKKKKEYLLEERDINKFEVQKEFINRNLVDTRYATAELTNYLKAYFSANNMNVKVKTINGSFTDYLRKVWKFKKERNHGYKHHAEDALIIANADFLFKENKKLKAVNSVLEKPEIETKQLDIQVDSEDNYSEMFIIPKQVQDIKDFRNFKYSHRVDKKPNRKLINDTLYSTRKKDNSTYIVQTIKDIYAKDNTTLKKQFDKSPEKFLMYQHDPRTFEKLEVIMKQYANEKNPLAKYHEETGEYLTKYSKKNNGPIVKSLKYIGNKLGSHLDVTHQFKSSTKKLVKLSIKPYRFDVYLTDKGYKFITISYLDVLKKDNYYYIPEQKYDKLKLGKAIDKNAKFIASFYKNDLIKLDGEIYKIIGVNSDTRNMIELDLPDIRYKEYCELNNIKGEPHIKKTIGKKVNSIEKLTTDVLGNVFTNTQYTKPQLLFKRGN

SEQ ID NO: 721 - skipped

SEQ ID NO: 722 - DNA, 27 bp, synthetic construct
  misc_feature 1..27: note = Synthetic: c-Myc NLS
  source 1..27: mol_type = other DNA
ccggcagctaagaaaaagaaactggat

SEQ ID NO: 723 - DNA, 54 bp, synthetic construct
  misc_feature 1..54: note = Synthetic: SV40 NLS and linker encoded by the nucleic acid sequence
  source 1..54: mol_type = other DNA
atgatggccccaaagaagaagcggaaggtcggtatccacggagtcccagcagcc

SEQ ID NO: 724-729 - skipped (6 entries)

SEQ ID NO: 730 - protein, 1368 aa, Streptococcus pyogenes [sequence omitted]

SEQ ID NO: 731-899 - skipped (169 entries)

SEQ ID NO: 900 - DNA, 77 bp, synthetic construct
  misc_feature 1..77: note = Synthetic: Wildtype
  source 1..77: mol_type = other DNA
gttttagtactctggaaacagaatctactgaaacaagacaatatgtcgtgtttatcccatcaatttattggtgggat

SEQ ID NO: 901 - DNA, 77 bp, synthetic construct
  misc_feature 1..77: note = Synthetic: Slu_v5
  source 1..77: mol_type = other DNA
gtttcagtactctggaaacagaatctactgaaacaagacaatatgtcgtgtttatcccatcaatttattggtgggat

SEQ ID NO: 902 - DNA, 77 bp, synthetic construct
  misc_feature 1..77: note = Synthetic: Slu_v5-1
  source 1..77: mol_type = other DNA
gtttggtaacctaggaaactagatcttaccaaacaagacaatatgtcgtgtttatcccatcaatttattggtgggat

SEQ ID NO: 903 - DNA, 77 bp, synthetic construct
  misc_feature 1..77: note = Synthetic: Slu_v5-2
  source 1..77: mol_type = other DNA
gtttcagtactctggaaacagaatctactgaaacaaggcaaaatgccgtgtttatcccatcaatttattggtgggat

SEQ ID NO: 904 - DNA, 77 bp, synthetic construct
  misc_feature 1..77: note = Synthetic: Slu_v5-3
  source 1..77: mol_type = other DNA
gtttcagtactctggaaacagaatctactgaaacaagacaatatgtcgcgcccatcccatcaatttattggtgggat

SEQ ID NO: 905 - DNA, 77 bp, synthetic construct
  misc_feature 1..77: note = Synthetic: Slu_v5-4
  source 1..77: mol_type = other DNA
gtttcagtactctggaaacagaatctactgaaacaagacaatatgtcgtgtttatgggttgaatttattcgacccat

SEQ ID NO: 906 - DNA, 77 bp, synthetic construct
  misc_feature 1..77: note = Synthetic: Slu_v5-5
  source 1..77: mol_type = other DNA
gtttggtaacctaggaaactagatcttaccaaacaaggcaaaatgccgtgtttatcccatcaatttattggtgggat

SEQ ID NO: 907 - DNA, 77 bp, synthetic construct
  misc_feature 1..77: note = Synthetic: Slu_v5-6
  source 1..77: mol_type = other DNA
gtttggtaacctaggaaactagatcttaccaaacaagacaatatgtcgcgcccatcccatcaatttattggtgggat

SEQ ID NO: 908 - DNA, 77 bp, synthetic construct
  misc_feature 1..77: note = Synthetic: Slu_v5-7
  source 1..77: mol_type = other DNA
gtttggtaacctaggaaactagatcttaccaaacaagacaatatgtcgtgtttatgggttgaatttattcgacccat

SEQ ID NO: 909 - DNA, 77 bp, synthetic construct
  misc_feature 1..77: note = Synthetic: Slu_v5-8
  source 1..77: mol_type = other DNA
gtttcagtactctggaaacagaatctactgaaacaaggcaaaatgccgcgcccatcccatcaatttattggtgggat

SEQ ID NO: 910 - DNA, 77 bp, synthetic construct
  misc_feature 1..77: note = Synthetic: Slu_v5-9
  source 1..77: mol_type = other DNA
gtttcagtactctggaaacagaatctactgaaacaaggcaaaatgccgtgtttatgggttgaatttattcgacccat

SEQ ID NO: 911 - DNA, 77 bp, synthetic construct
  misc_feature 1..77: note = Synthetic: Slu_v5-10
  source 1..77: mol_type = other DNA
gtttcagtactctggaaacagaatctactgaaacaagacaatatgtcgcgcccatgggttgaatttattcgacccat

SEQ ID NO: 912 - DNA, 77 bp, synthetic construct
  misc_feature 1..77: note = Synthetic: Slu_v5-11
  source 1..77: mol_type = other DNA
gtttggtaacctaggaaactagatcttaccaaacaaggcaaaatgccgcgcccatcccatcaatttattggtgggat

SEQ ID NO: 913 - DNA, 77 bp, synthetic construct
  misc_feature 1..77: note = Synthetic: Slu_v5-12
  source 1..77: mol_type = other DNA
gtttggtaacctaggaaactagatcttaccaaacaaggcaaaatgccgtgtttatgggttgaatttattcgacccat

SEQ ID NO: 914 - DNA, 77 bp, synthetic construct
  misc_feature 1..77: note = Synthetic: Slu_v5-13
  source 1..77: mol_type = other DNA
gtttggtaacctaggaaactagatcttaccaaacaagacaatatgtcgcgcccatgggttgaatttattcgacccat

SEQ ID NO: 915 - DNA, 77 bp, synthetic construct
  misc_feature 1..77: note = Synthetic: Slu_v5-14
  source 1..77: mol_type = other DNA
gtttcagtactctggaaacagaatctactgaaacaaggcaaaatgccgcgcccatgggttgaatttattcgacccat

SEQ ID NO: 916 - DNA, 77 bp, synthetic construct
  misc_feature 1..77: note = Synthetic: Slu_v5-15
  source 1..77: mol_type = other DNA
gtttggtaacctaggaaactagatcttaccaaacaaggcaaaatgccgcgcccatgggttgaatttattcgacccat

SEQ ID NO: 917 - DNA, 87 bp, synthetic construct
  misc_feature 1..87: note = Synthetic: Slu v4
  source 1..87: mol_type = other DNA
gtttcagtactctgtgctggaaacagcacagaatctactgaaacaagacaatatgtcgtgtttatcccatcaatttattggtgggat

SEQ ID NO: 918-941 - skipped (24 entries)

SEQ ID NO: 942 - protein, 9 aa, synthetic construct
  REGION 1..9: note = Synthetic: c-Myc NLS
PAAKKKKLD

SEQ ID NO: 943-7020 - skipped (6078 entries)

SEQ ID NO: 7021 - protein, 1057 aa, synthetic construct
  REGION 1..1057: note = Synthetic: sRGN1
MNQKFILGLDIGITSVGYGLIDYETKNIIDAGVRLFPEANVENNEGRRSKRGSRRLKRRRIHRLDRVKHLLAEYDLLDLTNIPKSTNPYQTRVKGLNEKLSKDELVIALLHIAKRRGIHNVDVAADKEETASDSLSTKDQINKNAKFLESRYVCELQKERLENEGHVRGVENRFLTKDIVREAKKIIDTQMQYYPEIDETFKEKYISLVETRREYFEGPGKGSPFGWEGNIKKWFEQMMGHCTYFPEELRSVKYSYSAELFNALNDLNNLVITRDEDAKLNYGEKFQIIENVFKQKKTPNLKQIAIEIGVHETEIKGYRVNKSGTPEFTEFKLYHDLKSIVFDKSILENEAILDQIAEILTIYQDEQSIKEELNKLPEILNEQDKAEIAKLIGYNGTHRLSLKCIHLINEELWQTSRNQMEIFNYLNIKPNKVDLSEQNKIPKDMVNDFILSPVVKRTFIQSINVINKVIEKYGIPEDIIIELARENNSDDRKKFINNLQKKNEATRKRINEIIGQTGNQNAKRIVEKIRLHDQQEGKCLYSLKDIPLEDLLRNPNNYDIDHIIPRSVSFDDSMHNKVLVRREQNAKKNNQTPYQYLTSGYADIKYSVFKQHVLNLAENKDRMTKKKREYLLEERDINKFEVQKEFINRNLVDTRYATRELTNYLKAYFSANNMNVKVKTINGSFTDYLRKVWKFKKERNHGYKHHAEDALIIANADFLFKENKKLKAVNSVLEKPEIETKQLDIQVDSEDNYSEMFIIPKQVQDIKDFRNFKYSHRVDKKPNRQLINDTLYSTRKKDNSTYIVQTIKDIYAKDNTTLKKQFDKSPEKFLMYQHDPRTFEKLEVIMKQYANEKNPLAKYHEETGEYLTKYSKKNNGPIVKSLKYIGNKLGSHLDVTHQFKSSTKKLVKLSIKPYRFDVYLTDKGYKFITISYLDVLKKDNYYYIPEQKYDKLKLGKAIDKNAKFIASFYKNDLIKLDGEIYKIIGVNSDTRNMIELDLPDIRYKEYCELNNIKGEPRIKKTIGKKVNSIEKLTTDVLGNVFTNTQYTKPQLLFKRGN

SEQ ID NO: 7022 - protein, 1053 aa, synthetic construct
  REGION 1..1053: note = Synthetic: sRGN2
MNQKFILGLDIGITSVGYGLIDYETKNIIDAGVRLFPEANVENNEGRRSKRGSRRLKRRRIHRLERVKSLLSEYKIISGLAPTNNQPYNIRVKGLTEQLTKDELAVALLHIAKRRGIHKIDVIDSNDDVGNELSTKEQLNKNSKLLKDKFVCQIQLERMNEGQVRGEKNRFKTADIIKEIIQLLNVQKNFHQLDENFINKYIELVEMRREYFEGPGQGSPFGWNGDLKKWYEMLMGHCTYFPQELRSVKYAYSADLFNALNDLNNLIIQRDNSEKLEYHEKYHIIENVFKQKKKPTLKQIAKEIGVNPEDIKGYRITKSGTPEFTEFKLYHDLKSVLFDQSILENEDVLDQIAEILTIYQDKDSIKSKLTELDILLNEEDKENIAQLTGYNGTHRLSLKCIRLVLEEQWYSSRNQMEIFTHLNIKPKKINLTAANKIPKAMIDEFILSPVVKRTFIQSINVINKVIEKYGIPEDIIIELARENNSDDRKKFINNLQKKNEATRKRINEIIGQTGNQNAKRIVEKIRLHDQQEGKCLYSLESIALMDLLNNPQNYEVDHIIPRSVAFDNSIHNKVLVKQIENSKKGNRTPYQYLNSSDAKLSYNQFKQHILNLSKSKDRISKKKKDYLLEERDINKFEVQKEFINRNLVDTRYATRELTSYLKAYFSANNMDVKVKTINGSFTNHLRKVWRFDKYRNHGYKHHAEDALIIANADFLFKENKKLKAVNSVLEKPEIETKQLDIQVDSEDNYSEMFIIPKQVQDIKDFRNFKYSHRVDKKPNRQLINDTLYSTRKKDNSTYIVQTIKDIYAKDNTTLKKQFDKSPEKFLMYQHDPRTFEKLEVIMKQYANEKNPLAKYHEETGEYLTKYSKKNNGPIVKSLKYIGNKLGSHLDVTHQFKSSTKKLVKLSIKPYRFDVYLTDKGYKFITISYLDVLKKDNYYYIPEQKYDKLKLGKAIDKNAKFIASFYKNDLIKLDGEIYKIIGVNSDTRNMIELDLPDIRYKEYCELNNIKGEPRIKKTIGKKVNSIEKLTTDVLGNVFTNTQYTKPQLLFKRGN

SEQ ID NO: 7023 - protein, 1057 aa, synthetic construct
  REGION 1..1057: note = Synthetic: sRGN3
MNQKFILGLDIGITSVGYGLIDYETKNIIDAGVRLFPEANVENNEGRRSKRGSRRLKRRRIHRLERVKLLLTEYDLINKEQIPTSNNPYQIRVKGLSEILSKDELAIALLHLAKRRGIHNVDVAADKEETASDSLSTKDQINKNAKFLESRYVCELQKERLENEGHVRGVENRFLTKDIVREAKKIIDTQMQYYPEIDETFKEKYISLVETRREYFEGPGQGSPFGWNGDLKKWYEMLMGHCTYFPQELRSVKYAYSADLFNALNDLNNLIIQRDNSEKLEYHEKYHIIENVFKQKKKPTLKQIAKEIGVNPEDIKGYRITKSGTPEFTSFKLFHDLKKVVKDHAILDDIDLLNQIAEILTIYQDKDSIVAELGQLEYLMSEADKQSISELTGYTGTHSLSLKCMNMIIDELWHSSMNQMEVFTYLNMRPKKYELKGYQRIPTDMIDDAILSPVVKRTFIQSINVINKVIEKYGIPEDIIIELARENNSDDRKKFINNLQKKNEATRKRINEIIGQTGNQNAKRIVEKIRLHDQQEGKCLYSLESIPLEDLLNNPNHYEVDHIIPRSVSFDNSYHNKVLVKQSENSKKSNLTPYQYFNSGKSKLSYNQFKQHILNLSKSQDRISKKKKEYLLEERDINKFEVQKEFINRNLVDTRYATRELTNYLKAYFSANNMNVKVKTINGSFTDYLRKVWKFKKERNHGYKHHAEDALIIANADFLFKENKKLKAVNSVLEKPEIETKQLDIQVDSEDNYSEMFIIPKQVQDIKDFRNFKYSHRVDKKPNRQLINDTLYSTRKKDNSTYIVQTIKDIYAKDNTTLKKQFDKSPEKFLMYQHDPRTFEKLEVIMKQYANEKNPLAKYHEETGEYLTKYSKKNNGPIVKSLKYIGNKLGSHLDVTHQFKSSTKKLVKLSIKPYRFDVYLTDKGYKFITISYLDVLKKDNYYYIPEQKYDKLKLGKAIDKNAKFIASFYKNDLIKLDGEIYKIIGVNSDTRNMIELDLPDIRYKEYCELNNIKGEPRIKKTIGKKVNSIEKLTTDVLGNVFTNTQYTKPQLLFKRGN

SEQ ID NO: 7024 - protein, 1057 aa, synthetic construct
  REGION 1..1057: note = Synthetic: sRGN3.1
MNQKFILGLDIGITSVGYGLIDYETKNIIDAGVRLFPEANVENNEGRRSKRGSRRLKRRRIHRLERVKLLLTEYDLINKEQIPTSNNPYQIRVKGLSEILSKDELAIALLHLAKRRGIHNVDVAADKEETASDSLSTKDQINKNAKFLESRYVCELQKERLENEGHVRGVENRFLTKDIVREAKKIIDTQMQYYPEIDETFKEKYISLVETRREYFEGPGQGSPFGWNGDLKKWYEMLMGHCTYFPQELRSVKYAYSADLFNALNDLNNLIIQRDNSEKLEYHEKYHIIENVFKQKKKPTLKQIAKEIGVNPEDIKGYRITKSGTPEFTSFKLFHDLKKVVKDHAILDDIDLLNQIAEILTIYQDKDSIVAELGQLEYLMSEADKQSISELTGYTGTHSLSLKCMNMIIDELWHSSMNQMEVFTYLNMRPKKYELKGYQRIPTDMIDDAILSPVVKRTFIQSINVINKVIEKYGIPEDIIIELARENNSDDRKKFINNLQKKNEATRKRINEIIGQTGNQNAKRIVEKIRLHDQQEGKCLYSLESIPLEDLLNNPNHYEVDHIIPRSVSFDNSYHNKVLVKQSENSKKSNLTPYQYFNSGKSKLSYNQFKQHILNLSKSQDRISKKKKEYLLEERDINKFEVQKEFINRNLVDTRYATRELTNYLKAYFSANNMNVKVKTINGSFTDYLRKVWKFKKERNHGYKHHAEDALIIANADFLFKENKKLKAVNSVLEKPEIETKQLDIQVDSEDNYSEMFIIPKQVQDIKDFRNFKYSHRVDKKPNRQLINDTLYSTRKKDNSTYIVQTIKDIYAKDNTTLKKQFDKSPEKFLMYQHDPRTFEKLEVIMKQYANEKNPLAKYHEETGEYLTKYSKKNNGPIVKSLKYIGNKLGSHLDVTHQFKSSTKKLVKLSIKNYRFDVYLTEKGYKFVTIAYLNVFKKDNYYYIPKDKYQELKEKKKIKDTDQFIASFYKNDLIKLNGDLYKIIGVNSDDRNIIELDYYDIKYKDYCEINNIKGEPRIKKTIGKKTESIEKFTTDVLGNLYLHSTEKAPQLIFKRGL

SEQ ID NO: 7025 - protein, 1057 aa, synthetic construct
  REGION 1..1057: note = Synthetic: sRGN3.2
MNQKFILGLDIGITSVGYGLIDYETKNIIDAGVRLFPEANVENNEGRRSKRGSRRLKRRRIHRLERVKLLLTEYDLINKEQIPTSNNPYQIRVKGLSEILSKDELAIALLHLAKRRGIHNVDVAADKEETASDSLSTKDQINKNAKFLESRYVCELQKERLENEGHVRGVENRFLTKDIVREAKKIIDTQMQYYPEIDETFKEKYISLVETRREYFEGPGQGSPFGWNGDLKKWYEMLMGHCTYFPQELRSVKYAYSADLFNALNDLNNLIIQRDNSEKLEYHEKYHIIENVFKQKKKPTLKQIAKEIGVNPEDIKGYRITKSGTPEFTSFKLFHDLKKVVKDHAILDDIDLLNQIAEILTIYQDKDSIVAELGQLEYLMSEADKQSISELTGYTGTHSLSLKCMNMIIDELWHSSMNQMEVFTYLNMRPKKYELKGYQRIPTDMIDDAILSPVVKRTFIQSINVINKVIEKYGIPEDIIIELARENNSDDRKKFINNLQKKNEATRKRINEIIGQTGNQNAKRIVEKIRLHDQQEGKCLYSLESIPLEDLLNNPNHYEVDHIIPRSVSFDNSYHNKVLVKQSENSKKSNLTPYQYFNSGKSKLSYNQFKQHILNLSKSQDRISKKKKEYLLEERDINKFEVQKEFINRNLVDTRYATRELTNYLKAYFSANNMNVKVKTINGSFTDYLRKVWKFKKERNHGYKHHAEDALIIANADFLFKENKKLKAVNSVLEKPEIETKQLDIQVDSEDNYSEMFIIPKQVQDIKDFRNFKFSHRVDKKPNRQLINDTLYSTRMKDEHDYIVQTITDIYGKDNTNLKKQFNKNPEKFLMYQNDPKTFEKLSIIMKQYSDEKNPLAKYYEETGEYLTKYSKKNNGPIVKKIKLLGNKVGNHLDVTNKYENSTKKLVKLSIKNYRFDVYLTEKGYKFVTIAYLNVFKKDNYYYIPKDKYQELKEKKKIKDTDQFIASFYKNDLIKLNGDLYKIIGVNSDDRNIIELDYYDIKYKDYCEINNIKGEPRIKKTIGKKTESIEKFTTDVLGNLYLHSTEKAPQLIFKRGL

SEQ ID NO: 7026 - protein, 1057 aa, synthetic construct
  REGION 1..1057: note = Synthetic: sRGN3.3
MNQKFILGLDIGITSVGYGLIDYETKNIIDAGVRLFPEANVENNEGRRSKRGSRRLKRRRIHRLERVKLLLTEYDLINKEQIPTSNNPYQIRVKGLSEILSKDELAIALLHLAKRRGIHNVDVAADKEETASDSLSTKDQINKNAKFLESRYVCELQKERLENEGHVRGVENRFLTKDIVREAKKIIDTQMQYYPEIDETFKEKYISLVETRREYFEGPGQGSPFGWNGDLKKWYEMLMGHCTYFPQELRSVKYAYSADLFNALNDLNNLIIQRDNSEKLEYHEKYHIIENVFKQKKKPTLKQIAKEIGVNPEDIKGYRITKSGTPEFTSFKLFHDLKKVVKDHAILDDIDLLNQIAEILTIYQDKDSIVAELGQLEYLMSEADKQSISELTGYTGTHSLSLKCMNMIIDELWHSSMNQMEVFTYLNMRPKKYELKGYQRIPTDMIDDAILSPVVKRTFIQSINVINKVIEKYGIPEDIIIELARENNSDDRKKFINNLQKKNEATRKRINEIIGQTGNQNAKRIVEKIRLHDQQEGKCLYSLESIPLEDLLNNPNHYEVDHIIPRSVSFDNSYHNKVLVKQSENSKKSNLTPYQYFNSGKSKLSYNQFKQHILNLSKSQDRISKKKKEYLLEERDINKFEVQKEFINRNLVDTRYATRELTSYLKAYFSANNMDVKVKTINGSFTNHLRKVWRFDKYRNHGYKHHAEDALIIANADFLFKENKKLQNTNKILEKPTIENNTKKVTVEKEEDYNNVFETPKLVEDIKQYRDYKFSHRVDKKPNRQLINDTLYSTRMKDEHDYIVQTITDIYGKDNTNLKKQFNKNPEKFLMYQNDPKTFEKLSIIMKQYSDEKNPLAKYYEETGEYLTKYSKKNNGPIVKKIKLLGNKVGNHLDVTNKYENSTKKLVKLSIKNYRFDVYLTEKGYKFVTIAYLNVFKKDNYYYIPKDKYQELKEKKKIKDTDQFIASFYKNDLIKLNGDLYKIIGVNSDDRNIIELDYYDIKYKDYCEINNIKGEPRIKKTIGKKTESIEKFTTDVLGNLYLHSTEKAPQLIFKRGL

SEQ ID NO: 7027 - protein, 1054 aa, synthetic construct
  REGION 1..1054: note = Synthetic: sRGN4
MNQKFILGLDIGITSVGYGLIDYETKNIIDAGVRLFPEANVENNEGRRSKRGSRRLKRRRIHRLERVKKLLEDYNLLDQSQIPQSTNPYAIRVKGLSEALSKDELVIALLHIAKRRGIHNINVSSEDEDASNELSTKEQINRNNKLLKDKYVCEVQLQRLKEGQIRGEKNRFKTTDILKEIDQLLKVQKDYHNLDIDFINQYKEIVETRREYFEGPGKGSPYGWEGDPKAWYETLMGHCTYFPDELRSVKYAYSADLFNALNDLNNLVIQRDGLSKLEYHEKYHIIENVFKQKKKPTLKQIANEINVNPEDIKGYRITKSGKPEFTSFKLFHDLKKVVKDHAILDDIDLLNQIAEILTIYQDKDSIVAELGQLEYLMSEADKQSISELTGYTGTHSLSLKCMNMIIDELWHSSMNQMEVFTYLNMRPKKYELKGYQRIPTDMIDDAILSPVVKRTFIQSINVINKVIEKYGIPEDIIIELARENNSDDRKKFINNLQKKNEATRKRINEIIGQTGNQNAKRIVEKIRLHDQQEGKCLYSLESIPLEDLLNNPNHYEVDHIIPRSVSFDNSYHNKVLVKQSENSKKSNLTPYQYFNSGKSKLSYNQFKQHILNLSKSQDRISKKKKEYLLEERDINKFEVQKEFINRNLVDTRYATRELTNYLKAYFSANNMNVKVKTINGSFTDYLRKVWKFKKERNHGYKHHAEDALIIANADFLFKENKKLKAVNSVLEKPEIETKQLDIQVDSEDNYSEMFIIPKQVQDIKDFRNFKYSHRVDKKPNRQLINDTLYSTRKKDNSTYIVQTIKDIYAKDNTTLKKQFDKSPEKFLMYQHDPRTFEKLEVIMKQYANEKNPLAKYHEETGEYLTKYSKKNNGPIVKSLKYIGNKLGSHLDVTHQFKSSTKKLVKLSIKPYRFDVYLTDKGYKFITISYLDVLKKDNYYYIPEQKYDKLKLGKAIDKNAKFIASFYKNDLIKLDGEIYKIIGVNSDTRNMIELDLPDIRYKEYCELNNIKGEPRIKKTIGKKVNSIEKLTTDVLGNVFTNTQYTKPQLLFKRGN

SEQ ID NO: 7028 - protein, 1051 aa, Staphylococcus hyicus
  REGION 1..1051: note = misc_feature - Staphylococcus hyicus Cas9 or ShyCas9
MNNYILGLDIGITSVGYGIVDSDTREIKDAGVRLFPEANVDNNEGRRSKRGARRLKRRRIHRLDRVKHLLAEYDLLDLTNIPKSTNPYQTRVKGLNEKLSKDELVIALLHIAKRRGIHNVNVMMDDNDSGNELSTKDQLKKNAKALSDKYVCELQLERFEQDYKVRGEKNRFKTEDFVREARKLLETQSKFFEIDQTFIMRYIELIETRREYFEGPGKGSPFGWEGNIKKWFEQMMGHCTYFPEELRSVKYSYSAELFNALNDLNNLVITRDEDAKLNYGEKFQIIENVFKQKKTPNLKQIAIEIGVHETEIKGYRVNKSGKPEFTQFKLYHDLKNIFKDPKYLNDIQLMDNIAEIITIYQDAESIIKELNQLPELLSEREKEKISALSGYSGTHRLSLKCINLLLDDLWESSLNQMELFTKLNLKPKKIDLSQQHKIPSKLVDDFILSPVVKRAFIQSIQVVNAIIDKYGLPEDIIIELARENNSDDRRKFLNQLQKQNEETRKQVEKVLREYGNDNAKRIVQKIKLHNMQEGKCLYSLKDIPLEDLLRNPHHYEVDHIIPRSVAFDNSMHNKVLVRADENSKKGNRTPYQYLNSSESSLSYNEFKQHILNLSKTKDRITKKKREYLLEERDINKFDVQKEFINRNLVDTRYATRELTSLLKAYFSANNLDVKVKTINGSFTNYLRKVWKFDKDRNKGYKHHAEDALIIANADFLFKHNKKLRNINKVLDAPSKEVDKKRVTVQSEDEYNQIFEDTQKAQAIKKFEIRKFSHRVDKKPNRQLINDTLYSTRNIDGIEYVVESIKDIYSVNNDKVKTKFKKDPHRLLMYRNDPQTFEKFEKVFKQYESEKNPFAKYYEETGEKIRKFSKTGQGPYINKIKYLRERLGRHCDVTNKYINSRNKIVQLKIYSYRFDIYQYGNNYKMITISYIDLEQKSNYYYISREKYEQKKKDKQIDDSYKFIGSFYKNDIINYNGEMYRVIGVNDSEKNKIQLDMIDISIKDYMELNNIKKTGVIYKTIGKSTTHIEKYTTDILGNLYKAAPPKKPQLIFK

SEQ ID NO: 7029 - protein, 1052 aa, Staphylococcus microti
  REGION 1..1052: note = misc_feature - Staphylococcus microti Cas9 or Smi Cas9
MEKDYILGLDIGIGSVGYGLIDYDTKSIIDAGVRLFPEANADNNLGRRAKRGARRLKRRRIHRLERVKSLLSEYKIISGLAPTNNQPYNIRVKGLTEQLTKDELAVALLHIAKRRGIHNVDVAADKEETASDSLSTKDQINKNAKFLESRYVCELQKERLENEGHVRGVENRFLTKDIVREAKKIIDTQMQYYPEIDETFKEKYISLVETRREYYEGPGKGSPYGWDADVKKWYQLMMGHCTYFPVEFRSVKYAYTADLYNALNDLNNLTIARDDNPKLEYHEKYHIIENVFKQKRNPTLKQIAKEIGVNDINISGYRVTKSGKPQFTSFKLFHDLKKVVKDHAILDDIDLLNQIAEILTIYQDKDSIVAELGQLEYLMSEADKQSISELTGYTGTHSLSLKCMNMIIDELWHSSMNQMEVFTYLNMRPKKYELKGYQRIPTDMIDDAILSPVVKRSFKQAIGVVNAIIKKYGLPKDIIIELARESNSAEKSRYLRAIQKKNEKTRERIEAIIKEYGNENAKGLVQKIKLHDAQEGKCLYSLKDIPLEDLLRNPNNYDIDHIIPRSVSFDDSMHNKVLVRREQNAKKNNQTPYQYLTSGYADIKYSVFKQHVLNLAENKDRMTKKKREYLLEERNINKYDVQKEFINRNLVDTRYTTRELTTLLKTYFTINNLDVKVKTINGSFTDFLRKRWGFKKNRDEGYKHHAEDALIIANADYLFKEHKLLKEIKDVSDLAGDERNSNVKDEDQYEEVFGGYFKIEDIKKYKIKKFSHRVDKKPNRQLINDTIYSTRVKDDKRYLINTLKNLYDKSNGDLKERMQKDPESLLMYHHDPQTFEKLKIVMSQYENEKNPLAKYFEETGQYLTKYAKHDNGPAIHKIKYYGNKLVEHLDITKNYHNPQNKVVQLSQKSFRFDVYQTDKGYKFISIAYLTLKNEKNYYAISQEKYDQLKSEKKISNNAVFIGSFYTSDIIEINNEKFRVIGVNSDKNNLIEVDRIDIRQKEFIELEEEKKNNRIKVTIGRKTTNIEKFHTDILGNMYKSKRPKAPQLVFKKG

SEQ ID NO: 7030 - protein, 1054 aa, Staphylococcus pasteuri
  REGION 1..1054: note = misc_feature - Staphylococcus pasteuri Cas9 or Spa Cas9
MKEKYILGLDLGITSVGYGIINFETKKIIDAGVRLFPEANVDNNEGRRSKRGSRRLKRRRIHRLERVKLLLTEYDLINKEQIPTSNNPYQIRVKGLSEILSKDELAIALLHLAKRRGIHNINVSSEDEDASNELSTKEQINRNNKLLKDKYVCEVQLQRLKEGQIRGEKNRFKTTDILKEIDQLLKVQKDYHNLDIDFINQYKEIVETRREYFEGPGQGSPFGWNGDLKKWYEMLMGHCTYFPQELRSVKYAYSADLFNALNDLNNLIIQRDNSEKLEYHEKYHIIENVFKQKKKPTLKQIAKEIGVNPEDIKGYRITKSGTPQFTEFKLYHDLKSIVFDKSILENEAILDQIAEILTIYQDEQSIKEELNKLPEILNEQDKAEIAKLIGYNGTHRLSLKCIHLINEELWQTSRNQMEIFNYLNIKPNKVDLSEQNKIPKDMVNDFILSPVVKRTFIQSINVINKVIEKYGIPEDIIIELARENNSDDRKKFINNLQKKNEATRKRINEIIGQTGNQNAKRIVEKIRLHDQQEGKCLYSLESIALMDLLNNPQNYEVDHIIPRSVAFDNSIHNKVLVKQIENSKKGNRTPYQYLNSSDAKLSYNQFKQHILNLSKSKDRISKKKKDYLLEERDINKFEVQKEFINRNLVDTRYATRELTSYLKAYFSANNMDVKVKTINGSFTNHLRKVWRFDKYRNHGYKHHAEDALIIANADFLFKENKKLQNTNKILEKPTIENNTKKVTVEKEEDYNNVFETPKLVEDIKQYRDYKFSHRVDKKPNRQLINDTLYSTRMKDEHDYIVQTITDIYGKDNTNLKKQFNKNPEKFLMYQNDPKTFEKLSIIMKQYSDEKNPLAKYYEETGEYLTKYSKKNNGPIVKKIKLLGNKVGNHLDVTNKYENSTKKLVKLSIKNYRFDVYLTEKGYKFVTIAYLNVFKKDNYYYIPKDKYQELKEKKKIKDTDQFIASFYKNDLIKLNGDLYKIIGVNSDDRNIIELDYYDIKYKDYCEINNIKGEPRIKKTIGKKTESIEKFTTDVLGNLYLHSTEKAPQLIFKRGL

SEQ ID NO: 7031 - protein, 1093 aa, synthetic construct
  REGION 1..1093: note = Synthetic: Cas12i1
MSNKEKNASETRKAYTTKMIPRSHDRMKLLGNFMDYLMDGTPIFFELWNQFGGGIDRDIISGTANKDKISDDLLLAVNWFKVMPINSKPQGVSPSNLANLFQQYSGSEPDIQAQEYFASNFDTEKHQWKDMRVEYERLLAELQLSRSDMHHDLKLMYKEKCIGLSLSTAHYITSVMFGTGAKNNRQTKHQFYSKVIQLLEESTQINSVEQLASIILKAGDCDSYRKLRIRCSRKGATPSILKIVQDYELGTNHDDEVNVPSLIANLKEKLGRFEYECEWKCMEKIKAFLASKVGPYYLGSYSAMLENALSPIKGMTTKNCKFVLKQIDAKNDIKYENEPFGKIVEGFFDSPYFESDTNVKWVLHPHHIGESNIKTLWEDLNAIHSKYEEDIASLSEDKKEKRIKVYQGDVCQTINTYCEEVGKEAKTPLVQLLRYLYSRKDDIAVDKIIDGITFLSKKHKVEKQKINPVIQKYPSFNFGNNSKLLGKIISPKDKLKHNLKCNRNQVDNYIWIEIKVLNTKTMRWEKHHYALSSTRFLEEVYYPATSENPPDALAARFRTKTNGYEGKPALSAEQIEQIRSAPVGLRKVKKRQMRLEAARQQNLLPRYTWGKDFNINICKRGNNFEVTLATKVKKKKEKNYKVVLGYDANIVRKNTYAAIEAHANGDGVIDYNDLPVKPIESGFVTVESQVRDKSYDQLSYNGVKLLYCKPHVESRRSFLEKYRNGTMKDNRGNNIQIDFMKDFEAIADDETSLYYFNMKYCKLLQSSIRNHSSQAKEYREEIFELLRDGKLSVLKLSSLSNLSFVMFKVAKSLIGTYFGHLLKKPKNSKSDVKAPPITDEDKQKADPEMFALRLALEEKRLNKVKSKKEVIANKIVAKALELRDKYGPVLIKGENISDTTKKGKKSSTNSFLMDWLARGVANKVKEMVMMHQGLEFVEVNPNFTSHQDPFVHKNPENTFRARYSRCTPSELTEKNRKEILSFLSDKPSKRPTNAYYNEGAMAFLATYGLKKNDVLGVSLEKFKQIMANILHQRSEDQLLFPSRGGMFYLATYKLDADATSVNWNGKQFWVCNADLVAAYNVGLVDIQKDFKKK

SEQ ID NO: 7032 - protein, 1054 aa, synthetic construct
  REGION 1..1054: note = Synthetic: Cas12i2
MSSAIKSYKSVLRPNERKNQLLKSTIQCLEDGSAFFFKMLQGLFGGITPEIVRFSTEQEKQQQDIALWCAVNWFRPVSQDSLTHTIASDNLVEKFEEYYGGTASDAIKQYFSASIGESYYWNDCRQQYYDLCRELGVEVSDLTHDLEILCREKCLAVATESNQNNSIISVLFGTGEKEDRSVKLRITKKILEAISNLKEIPKNVAPIQEIILNVAKATKETFRQVYAGNLGAPSTLEKFIAKDGQKEFDLKKLQTDLKKVIRGKSKERDWCCQEELRSYVEQNTIQYDLWAWGEMFNKAHTALKIKSTRNYNFAKQRLEQFKEIQSLNNLLVVKKLNDFFDSEFFSGEETYTICVHHLGGKDLSKLYKAWEDDPADPENAIVVLCDDLKNNFKKEPIRNILRYIFTIRQECSAQDILAAAKYNQQLDRYKSQKANPSVLGNQGFTWTNAVILPEKAQRNDRPNSLDLRIWLYLKLRHPDGRWKKHHIPFYDTRFFQEIYAAGNSPVDTCQFRTPRFGYHLPKLTDQTAIRVNKKHVKAAKTEARIRLAIQQGTLPVSNLKITEISATINSKGQVRIPVKFDVGRQKGTLQIGDRFCGYDQNQTASHAYSLWEVVKEGQYHKELGCFVRFISSGDIVSITENRGNQFDQLSYEGLAYPQYADWRKKASKFVSLWQITKKNKKKEIVTVEAKEKFDAICKYQPRLYKFNKEYAYLLRDIVRGKSLVELQQIRQEIFRFIEQDCGVTRLGSLSLSTLETVKAVKGIIYSYFSTALNASKNNPISDEQRKEFDPELFALLEKLELIRTRKKKQKVERIANSLIQTCLENNIKFIRGEGDLSTTNNATKKKANSRSMDWLARGVFNKIRQLAPMHNITLFGCGSLYTSHQDPLVHRNPDKAMKCRWAAIPVKDIGDWVLRKLSQNLRAKNIGTGEYYHQGVKEFLSHYELQDLEEELLKWRSDRKSNIPCWVLQNRLAEKLGNKEAVVYIPVRGGRIYFATHKVATGAVSIVFDQKQVWVCNADHVAAANIALTVKGIGEQSSDEENPDGSRIKLQLTS

SEQ ID NO: 7033-9000 - skipped (1968 entries)

SEQ ID NO: 9001 - DNA, 219 bp, synthetic construct
  misc_feature 1..219: note = Synthetic: hU6d30
  source 1..219: mol_type = other DNA
gagggcctatttcccatgattccttcatatttgcatatacgatacaaggctgttagagagataattggaattaatttgactgtaaacacaaagatataatttcttgggtagtttgcagttttaaaattatgttttaaaatggactatcatatgcttaccgtaacttgaaagtatttcgatttcttggctttatatatcttgtggaaaggacgaaacacc

SEQ ID NO: 9002 - DNA, 189 bp, synthetic construct
  misc_feature 1..189: note = Synthetic: hU6d60
  source 1..189: mol_type = other DNA
gagggcctatttcccatgattccttcatatttgcatatacgatacaaggctgttagagagataattggaattaatttgacgtttgcagttttaaaattatgttttaaaatggactatcatatgcttaccgtaacttgaaagtatttcgatttcttggctttatatatcttgtggaaaggacgaaacacc

SEQ ID NO: 9003 - DNA, 159 bp, synthetic construct
  misc_feature 1..159: note = Synthetic: hU6d90
  source 1..159: mol_type = other DNA
gagggcctatttcccatgattccttcatatttgcatatacgatacaaggctgttagagagataatattatgttttaaaatggactatcatatgcttaccgtaacttgaaagtatttcgatttcttggctttatatatcttgtggaaaggacgaaacacc

SEQ ID NO: 9004 - DNA, 129 bp, synthetic construct
  misc_feature 1..129: note = Synthetic: hU6d120
  source 1..129: mol_type = other DNA
gagggcctatttcccatgattccttcatatttgcatatacgatacaaggcggactatcatatgcttaccgtaacttgaaagtatttcgatttcttggctttatatatcttgtggaaaggacgaaacacc

SEQ ID NO: 9005 - skipped

SEQ ID NO: 9006 - DNA, 213 bp, synthetic construct
  misc_feature 1..213: note = Synthetic: 7SKd30
  source 1..213: mol_type = other DNA
ctgcagtatttagcatgccccacccatctgcaaggcattctggatagtgtcaaaacagccggaaatcaagtccgtttatctcaaactttagcatttaaattagattttagttaaatttcctgctgaagctctagtacgataagcaacttgacctaagtgtaaagttgagacttccttcaggtttatatagcttgtgcgccgcttgggtacctc

SEQ ID NO: 9007 - DNA, 183 bp, synthetic construct
  misc_feature 1..183: note = Synthetic: 7SKd60
  source 1..183: mol_type = other DNA
ctgcagtatttagcatgccccacccatctgcaaggcattctggatagtgtcaaaacagccggaaatcaagtccgtttatcttaaatttcctgctgaagctctagtacgataagcaacttgacctaagtgtaaagttgagacttccttcaggtttatatagcttgtgcgccgcttgggtacctc

SEQ ID NO: 9008 - DNA, 153 bp, synthetic construct
  misc_feature 1..153: note = Synthetic: 7SKd90
  source 1..153: mol_type = other DNA
ctgcagtatttagcatgccccacccatctgcaaggcattctggatagtgtcaaaacagccggaaatagctctagtacgataagcaacttgacctaagtgtaaagttgagacttccttcaggtttatatagcttgtgcgccgcttgggtacctc

SEQ ID NO: 9009 - DNA, 123 bp, synthetic construct
  misc_feature 1..123: note = Synthetic: 7SKd120
  source 1..123: mol_type = other DNA
ctgcagtatttagcatgccccacccatctgcaaggcattctggatagtgtcagcaacttgacctaagtgtaaagttgagacttccttcaggtttatatagcttgtgcgccgcttgggtacctc

SEQ ID NO: 9010-9013 - skipped (4 entries)

SEQ ID NO: 9014 - DNA, 3156 bp, synthetic construct
  misc_feature 1..3156: note = Synthetic: SaCas9
  source 1..3156: mol_type = other DNA
aagcgcaattacatcctgggcctggatatcggcatcacctccgtgggctacggcatcatcgactatgagacacgggatgtgatcgacgccggcgtgagactgttcaaggaggccaacgtggagaacaatgagggccggcggagcaagaggggagcaaggcgcctgaagcggagaaggcgccacagaatccagagagtgaagaagctgctgttcgattacaacctgctgaccgaccactccgagctgtctggcatcaatccttatgaggcccgggtgaagggcctgtcccagaagctgtctgaggaggagttttctgccgccctgctgcacctggcaaagaggagaggcgtgcacaacgtgaatgaggtggaggaggacaccggcaacgagctgagcacaaaggagcagatcagccgcaattccaaggccctggaggagaagtatgtggccgagctgcagctggagcggctgaagaaggatggcgaggtgaggggctccatcaatcgcttcaagacctctgactacgtgaaggaggccaagcagctgctgaaggtgcagaaggcctaccaccagctggatcagagctttatcgatacatatatcgacctgctggagaccaggcgcacatactatgagggaccaggagagggctcccccttcggctggaaggacatcaaggagtggtacgagatgctgatgggccactgcacctattttccagaggagctgagatccgtgaagtacgcctataacgccgatctgtacaacgccctgaatgacctgaacaacctggtcatcaccagggatgagaacgagaagctggagtactatgagaagttccagatcatcgagaacgtgttcaagcagaagaagaagcctacactgaagcagatcgccaaggagatcctggtgaacgaggaggacatcaagggctaccgcgtgaccagcacaggcaagccagagttcaccaatctgaaggtgtatcacgatatcaaggacatcacagcccggaaggagatcatcgagaacgccgagctgctggatcagatcgccaagatcctgaccatctatcagagctccgaggacatccaggaggagctgaccaacctgaatagcgagctgacacaggaggagatcgagcagatcagcaatctgaagggctacaccggcacacacaacctgtccctgaaggccatcaatctgatcctggatgagctgtggcacacaaacgacaatcagatcgccatctttaacaggctgaagctggtgccaaagaaggtggacctgagccagcagaaggagatcccaaccacactggtggacgatttcatcctgtcccccgtggtgaagcggagcttcatccagagcatcaaagtgatcaacgccatcatcaagaagtacggcctgcccaatgatatcatcatcgagctggccagggagaagaactctaaggacgcccagaagatgatcaatgagatgcagaagaggaaccgccagaccaatgagcggatcgaggagatcatcagaaccacaggcaaggagaacgccaagtacctgatcgagaagatcaagctgcacgatatgcaggagggcaagtgtctgtatagcctggaggccatccctctggaggacctgctgaacaatccattcaactacgaggtggatcacatcatcccccggagcgtgagcttcgacaattcctttaacaataaggtgctggtgaagcaggaggagaactctaagaagggcaataggacccctttccagtacctgtctagctccgattctaagatcagctacgagaccttcaagaagcacatcctgaatctggccaagggcaagggccgcatctctaagaccaagaaggagtacctgctggaggagcgggacatcaacagattcagcgtgcagaaggacttcatcaaccggaatctggtggacaccagatacgccacacgcggcctgatgaatctgctgcggtcctatttcagagtgaacaatctggatgtgaaggtgaagagcatcaacggcggcttcacctcctttctgcggagaaagtggaagtttaagaaggagagaaacaagggctataagcaccacgccgaggatgccctgatcatcgccaatgccgacttcatctttaaggagtggaagaagctggacaaggccaagaaagtgatggagaaccagatgttcgaggagaagcaggccgagagcatgcccgagatcgagaccgagcaggagtacaaggagattttcatcacacctcaccagatcaagcacatcaaggacttcaaggactacaagtattcccacagggtggataagaagcccaaccgcgagctgatcaatgacaccctgtattctacaaggaaggacgataagggcaataccctgatcgtgaacaatctgaacggcctgtacgacaaggataatgacaagctgaagaagctgatcaacaagagccccgagaagctgctgatgtaccaccacgatcctcagacatatcagaagctgaagctgatcatggagcagtacggcgacgagaagaacccactgtataagtactatgaggagaccggcaactacctgacaaagtattccaagaaggataatggccccgtgatcaagaagatcaagtactatggcaacaagctgaatgcccacctggacatcaccgacgattaccccaacagccggaataaggtggtgaagctgagcctgaagccatacaggttcgacgtgtacctggacaacggcgtgtataagtttgtgacagtgaagaatctggatgtgatcaagaaggagaactactatgaagtgaatagcaagtgctacgaggaggccaagaagctgaagaagatcagcaaccaggccgagttcatcgcctctttttacaacaatgacctgatcaagatcaatggcgagctgtatagagtgatcggcgtgaacaatgatctgctgaaccgcatcgaagtgaatatgatcgacatcacctaccgggagtatctggagaacatgaatgataagaggccccctcgcatcatcaagaccatcgcctctaagacacagagcatcaagaagtactctacagacatcctgggcaacctgtatgaggtgaagagcaagaagcaccctcagatcatcaagaagggc

SEQ ID NO: 9015 - DNA, 22 bp, synthetic construct
  misc_feature 1..22: note = Synthetic: SluD14
  source 1..22: mol_type = other DNA
caggcctgggaaggcagcaagc

SEQ ID NO: 9016 - DNA, 22 bp, synthetic construct
  misc_feature 1..22: note = Synthetic: SluU63
  source 1..22: mol_type = other DNA
ggggctcgaagggtccttgtag

SEQ ID NO: 9017 - DNA, 22 bp, synthetic construct
  misc_feature 1..22: note = Synthetic: SluU64
  source 1..22: mol_type = other DNA
gggctcgaagggtccttgtagc

SEQ ID NO: 9018 - DNA, 22 bp, synthetic construct
  misc_feature 1..22: note = Synthetic: SluU08
  source 1..22: mol_type = other DNA
gccccgttggaagactgagtgc

SEQ ID NO: 9019 - DNA, 22 bp, synthetic construct
  misc_feature 1..22: note = Synthetic: SluU14
  source 1..22: mol_type = other DNA
tggaagactgagtgcccggggc

SEQ ID NO: 9020 - DNA, 22 bp, synthetic construct
  misc_feature 1..22: note = Synthetic: SluU26
  source 1..22: mol_type = other DNA
ggagctgggcggagacccacgc

SEQ ID NO: 9021 - DNA, 22 bp, synthetic construct
  misc_feature 1..22: note = Synthetic: SluU55
  source 1..22: mol_type = other DNA
gggccgggtccgcggccggcga

SEQ ID NO: 9022 - DNA, 22 bp, synthetic construct
  misc_feature 1..22: note = Synthetic: SluU22
  source 1..22: mol_type = other DNA
ccagttcacaaccgctccgagc

SEQ ID NO: 9023 - DNA, 22 bp, synthetic construct
  misc_feature 1..22: note = Synthetic: SluU29
  source 1..22: mol_type = other DNA
cggatcacaggactggagctgg

SEQ ID NO: 9024 - DNA, 22 bp, synthetic construct
  misc_feature 1..22: note = Synthetic: SluD08
  source 1..22: mol_type = other DNA
ccatccacgtcagggcctcagc

SEQ ID NO: 9025 - DNA, 22 bp, synthetic construct
  misc_feature 1..22: note = Synthetic: SluU10
  source 1..22: mol_type = other DNA
cccgttggaagactgagtgccc

SEQ ID NO: 9026 - DNA, 22 bp, synthetic construct
  misc_feature 1..22: note = Synthetic: SluD05
  source 1..22: mol_type = other DNA
tcggccaggctgaggccctgac

SEQ ID NO: 9027 - DNA, 22 bp, synthetic construct
  misc_feature 1..22: note = Synthetic: SluU30
  source 1..22: mol_type = other DNA
gcccggatcacaggactggagc

SEQ ID NO: 9028 - DNA, 22 bp, synthetic construct
  misc_feature 1..22: note = Synthetic: SluD25
  source 1..22: mol_type = other DNA
ctttgcgaaccaacgataggtg

SEQ ID NO: 9029 - DNA, 22 bp, synthetic construct
  misc_feature 1..22: note = Synthetic: SluU05
  source 1..22: mol_type = other DNA
gccccggagtcgaagacagttc

SEQ ID NO: 9030 - DNA, 22 bp, synthetic construct
  misc_feature 1..22: note = Synthetic: SluU07
  source 1..22: mol_type = other DNA
cactcagtcttccaacggggcc

SEQ ID NO: 9031 - DNA, 22 bp, synthetic construct
  misc_feature 1..22: note = Synthetic: SluU09
  source 1..22: mol_type = other DNA
ccccgttggaagactgagtgcc

SEQ ID NO: 9032 - DNA, 22 bp, synthetic construct
  misc_feature 1..22: note = Synthetic: SluU06
  source 1..22: mol_type = other DNA
tgtcttcgactccggggccccg

SEQ ID NO: 9033 - DNA, 22 bp, synthetic construct
  misc_feature 1..22: note = Synthetic: SluU33
  source 1..22: mol_type = other DNA
tgtgatccgggcccgcccccta

SEQ ID NO: 9034 - DNA, 22 bp, synthetic construct
  misc_feature 1..22: note = Synthetic: SluD06
  source 1..22: mol_type = other DNA
ccaggctgaggccctgacgtgg

SEQ ID NO: 9035 - DNA, 22 bp, synthetic construct
  misc_feature 1..22: note = Synthetic: SluU32
  source 1..22: mol_type = other DNA
ggggcgggcccggatcacagga

SEQ ID NO: 9036 - DNA, 22 bp, synthetic construct
  misc_feature 1..22: note = Synthetic: SluD92
  source 1..22: mol_type = other DNA
ttttattcgcgagggtcggggg

SEQ ID NO: 9037 - DNA, 22 bp, synthetic construct
  misc_feature 1..22: note = Synthetic: SluU21
  source 1..22: mol_type = other DNA
gctcggagcggttgtgaactgg

SEQ ID NO: 9038 - DNA, 22 bp, synthetic construct
  misc_feature 1..22: note = Synthetic: SluU52
  source 1..22: mol_type = other DNA
cggggagggaggggccgggtcc

SEQ ID NO: 9039 - DNA, 22 bp, synthetic construct
  misc_feature 1..22: note = Synthetic: SluU25
  source 1..22: mol_type = other DNA
tgggcggagacccacgctcgga

SEQ ID NO: 9040 - DNA, 22 bp, synthetic construct
  misc_feature 1..22: note = Synthetic: SluU59
  source 1..22: mol_type = other DNA
cgcggccggcgaacggggctcg

SEQ ID NO: 9041 - DNA, 22 bp, synthetic construct
  misc_feature 1..22: note = Synthetic: SluU60
  source 1..22: mol_type = other DNA
gcggccggcgaacggggctcga

SEQ ID NO: 9042 - DNA, 22 bp, synthetic construct
  misc_feature 1..22: note = Synthetic: SluU01
  source 1..22: mol_type = other DNA
aaccctagaactgtcttcgact

SEQ ID NO: 9043 - DNA, 22 bp, synthetic construct
  misc_feature 1..22: note = Synthetic: SluD99
  source 1..22: mol_type = other DNA
agatggagggccttttattcgc

SEQ ID NO: 9044 - DNA, 22 bp, synthetic construct
  misc_feature 1..22: note = Synthetic: SluD70
  source 1..22: mol_type = other DNA
cccaacaaccccaatccacgtt

SEQ ID NO: 9045 - DNA, 22 bp, synthetic construct
  misc_feature 1..22: note = Synthetic: SluU53
  source 1..22: mol_type = other DNA
cgcggacccggcccctccctcc

SEQ ID NO: 9046 - DNA, 22 bp, synthetic construct
  misc_feature 1..22: note = Synthetic: SluD91
  source 1..22: mol_type = other DNA
tttattcgcgagggtcgggggt

SEQ ID NO: 9047 - DNA, 22 bp, synthetic construct
  misc_feature 1..22: note = Synthetic: SluU65
  source 1..22: mol_type = other DNA
cagcagcagcattcccggctac

SEQ ID NO: 9048 - DNA, 22 bp, synthetic construct
  misc_feature 1..22: note = Synthetic: SluD100
  source 1..22: mol_type = other DNA
gtccagagctttgggcagatgg

SEQ ID NO: 9049 - DNA, 22 bp, synthetic construct
  misc_feature 1..22: note = Synthetic: SluU17
  source 1..22: mol_type = other DNA
tgtgaactggcaggcggtgggc

SEQ ID NO: 9050 - DNA, 22 bp, synthetic construct
  misc_feature 1..22: note = Synthetic: SluD95
  source 1..22: mol_type = other DNA
gggccttttattcgcgagggtc

SEQ ID NO: 9051 - DNA, 22 bp, synthetic construct
  misc_feature 1..22: note = Synthetic: SluD101
  source 1..22: mol_type = other DNA
agtccagagctttgggcagatg

SEQ ID NO: 9052 - DNA, 22 bp, synthetic construct
  misc_feature 1..22: note = Synthetic: SluD96
  source 1..22: mol_type = other DNA
agggccttttattcgcgagggt

SEQ ID NO: 9053 - DNA, 22 bp, synthetic construct
  misc_feature 1..22: note = Synthetic: SluU48
  source 1..22: mol_type = other DNA
gcccctccctccccggccgcta

SEQ ID NO: 9054 - DNA, 22 bp, synthetic construct
  misc_feature 1..22: note = Synthetic: SluU24
  source 1..22: mol_type = other DNA
ccacgctcggagcggttgtgaa

SEQ ID NO: 9055 - DNA, 22 bp, synthetic construct
  misc_feature 1..22: note = Synthetic: SluU34
  source 1..22: mol_type = other DNA
gctagggggcgggcccggatca

SEQ ID NO: 9056 - DNA, 22 bp, synthetic construct
  misc_feature 1..22: note = Synthetic: SluD26
  source 1..22: mol_type = other DNA
actttgcgaaccaacgataggt

SEQ ID NO: 9057 - DNA, 22 bp, synthetic construct
  misc_feature 1..22: note = Synthetic: SluD23
  source 1..22: mol_type = other DNA
caacgataggtgggggtgcgtg

SEQ ID NO: 9058 - DNA, 22 bp, synthetic construct
  misc_feature 1..22: note = Synthetic: SluU19
  source 1..22: mol_type = other DNA
agcggttgtgaactggcaggcg

SEQ ID NO: 9059 - DNA, 22 bp, synthetic construct
  misc_feature 1..22: note = Synthetic: SluD32
  source 1..22: mol_type = other DNA
cttgtgcatgacgccctgctct

SEQ ID NO: 9060 - DNA, 22 bp, synthetic construct
  misc_feature 1..22: note = Synthetic: SluD83
  source 1..22: mol_type = other DNA
gtggggacagacaataaatacc

SEQ ID NO: 9061 - DNA, 22 bp, synthetic construct
  misc_feature 1..22: note = Synthetic: SluU11
  source 1..22: mol_type = other DNA
cccgggcactcagtcttccaac

SEQ ID NO: 9062 - DNA, 22 bp, synthetic construct
  misc_feature 1..22: note = Synthetic: SluD65
  source 1..22: mol_type = other DNA
acctcgtcctccgactcgctga

SEQ ID NO: 9063 - DNA, 22 bp, synthetic construct
  misc_feature 1..22: note = Synthetic: SluU20
  source 1..22: mol_type = other DNA
cggagcggttgtgaactggcag
